(19) United States
(12) Patent Application Publication
(10) Pub. No.: US 2025/0381297 A1
(43) Pub. Date: Dec. 18, 2025

(54) DELIVERY, USE AND THERAPEUTIC APPLICATIONS OF THE CRISPR-CAS SYSTEMS AND COMPOSITIONS FOR HBV AND VIRAL DISEASES AND DISORDERS

(71) Applicants: The Broad Institute, Inc., Cambridge, MA (US); Massachusetts Institute of Technology, Cambridge, MA (US); Rockefeller University, New York, NY (US)

(72) Inventors: Sangeeta Bhatia, Cambridge, MA (US); Charles Rice, New York, NY (US); Feng Zhang, Cambridge, MA (US); David Benjamin Turitz Cox, Cambridge, MA (US); Vyas Ramanan, Cambridge, MA (US); Robert Schwartz, Cambridge, MA (US); Amir Shlomai, New York, NY (US)

(73) Assignees: The Broad Institute, Inc., Cambridge, MA (US); Massachusetts Institute of Technology, Cambridge, MA (US); Rockefeller University, New York, NY (US)

(21) Appl. No.: 19/079,848

(22) Filed: Mar. 14, 2025

Related U.S. Application Data
(63) Continuation of application No. 17/002,262, filed on Aug. 25, 2020, now Pat. No. 12,251,450.
Application No. 17/002,262 is a continuation of application No. 15/179,938, filed on Jun. 10, 2016, now abandoned.
Application No. 15/179,938 is a continuation-in-part of application No. PCT/US2014/070135, filed on Dec. 12, 2014.
(60) Provisional application No. 61/915,301, filed on Dec. 12, 2013.
(60) Provisional application No. 62/010,329, filed on Jun. 10, 2014.

(51) Int. Cl. A61K 48/00; A61K 38/46; C12N 9/22; C12N 15/01; C12N 15/10; C12N 15/113; C12N 15/63; G06Q 50/00; H04L 51/52; H04L 65/1069; H04L 67/306; H04L 67/53

(52) U.S. Cl. CPC A61K 48/005; A61K 38/465; C12N 9/22; C12N 15/01; C12N 15/102; C12N 15/113; C12N 15/63; G06Q 50/01; H04L 51/52; H04L 65/1069; H04L 67/306; H04L 67/53; C07K 2319/09; C12N 2310/20; C12N 2740/16043; C12N 2750/14143

(57) ABSTRACT

The invention provides for delivery, engineering and optimization of systems, methods, and compositions for manipulation of sequences and/or activities of target sequences. Provided are delivery systems and tissues or organ which are targeted as sites for delivery. Also provided are vectors and vector systems some of which encode one or more components of a CRISPR complex, as well as methods for the design and use of such vectors. Also provided are methods of directing CRISPR complex formation in eukaryotic cells to ensure enhanced specificity for target recognition and avoidance of toxicity and to edit or modify a target site in a genomic locus of interest to alter or improve the status of a disease or a condition.

### RELATED APPLICATIONS AND INCORPORATION BY REFERENCE

[0001] This application is a Continuation of U.S. application Ser. No. 17/002,262, filed on Aug. 25, 2020, now U.S. Pat. No. 12,251,450, that issued on Mar. 18, 2025, which is a Continuation of U.S. application Ser. No. 15/179,938, filed on Jun. 10, 2016, which is a Continuation-in-Part of International Application Number PCT/US14/70135, filed on Dec. 12, 2014, which published as PCT Publication No. WO2015/089465 on Jun. 18, 2015. This application claims priority from U.S. provisional application 61/915,301, filed Dec. 12, 2013, and U.S. provisional application 62/010,329, filed Jun. 10, 2014.

[0002] The foregoing application(s), and all documents cited therein or during its or their prosecution (“appln cited documents”) and all documents cited or referenced in the appln cited documents, and all documents cited or referenced herein (“herein cited documents”), and all documents cited or referenced in herein cited documents, together with any manufacturer's instructions, descriptions, product specifications, and product sheets for any products mentioned herein or in any document incorporated by reference herein, are hereby incorporated herein by reference, and may be employed in the practice of the invention. More specifically, all referenced documents are incorporated by reference to the same extent as if each individual document was specifically and individually indicated to be incorporated by reference.

### STATEMENT AS TO FEDERALLY SPONSORED RESEARCH

[0003] This invention was made with government support under Grant No. MH100706 awarded by the National Institutes of Health. The government has certain rights in the invention.

### SEQUENCE LISTING

[0004] The instant application contains a Sequence Listing which has been submitted electronically in XML format and is hereby incorporated by reference in its entirety. Said XML copy created on Jul. 2, 2025, is named 114203-5906_SL.xml and is 2,174,197 bytes in size.

### FIELD OF THE INVENTION

[0005] The present invention generally relates to the delivery, engineering, optimization and therapeutic applications of systems, methods, and compositions used for the control of gene expression involving sequence targeting, such as genome perturbation or gene-editing, that relate to Clustered Regularly Interspaced Short Palindromic Repeats (CRISPR) and components thereof.

### BACKGROUND OF THE INVENTION

[0006] Recent advances in genome sequencing techniques and analysis methods have significantly accelerated the ability to catalog and map genetic factors associated with a diverse range of biological functions and diseases. Precise genome targeting technologies are needed to enable systematic reverse engineering of causal genetic variations by allowing selective perturbation of individual genetic elements, as well as to advance synthetic biology, biotechnological, and medical applications. Although genome-editing techniques such as designer zinc fingers, transcription activator-like effectors (TALEs), or homing meganucleases are available for producing targeted genome perturbations, there remains a need for new genome engineering technologies that are affordable, easy to set up, scalable, and amenable to targeting multiple positions within the eukaryotic genome.

### SUMMARY OF THE INVENTION

[0007] The CRISPR-Cas system does not require the generation of customized proteins to target specific sequences but rather a single Cas enzyme can be programmed by a short RNA molecule to recognize a specific DNA target. Adding the CRISPR-Cas system to the repertoire of genome sequencing techniques and analysis methods may significantly simplify the methodology and accelerate the ability to catalog and map genetic factors associated with a diverse range of biological functions and diseases. To utilize the CRISPR-Cas system effectively for genome editing without deleterious effects, it is critical to understand aspects of engineering, optimization and cell-type/tissue/organ specific delivery of these genome engineering tools, which are aspects of the claimed invention.

[0008] There exists a pressing need for alternative and robust systems and techniques for nucleic sequence targeting with a wide array of applications. Aspects of this invention address this need and provide related advantages, particularly in relation to treatment of viral infections which persist due to integration of a virus into a host's genome and/or by maintenance of an episomal form (e.g. hepatitis B virus, HBV, which maintains extraordinary persistence in the nucleus of human hepatocytes by means of a long-lived episomal double-stranded DNA form called covalent closed circular DNA, or cccDNA). Applicants have shown that it is possible to directly cleave and reduce the abundance of this episomal form of the virus (cccDNA: a dsDNA structure that arises during the propagation of HBV in the cell nucleus and can remain permanently present in infected subjects).

[0009] An exemplary CRISPR complex comprises a CRISPR enzyme complexed with a guide sequence hybridized or hybridizable to a target sequence within the target polynucleotide. The guide sequence is linked to a tracr mate sequence, which in turn hybridizes to a tracr sequence.

[0010] In one aspect, the invention provides methods for using one or more elements of a CRISPR-Cas system. The CRISPR complex of the invention provides an effective means for modifying a target polynucleotide. The CRISPR complex of the invention has a wide variety of utilities including modifying (e.g., deleting, inserting, translocating, inactivating, activating) a target polynucleotide in a multiplicity of cell types in various tissues and organs. As such the CRISPR complex of the invention has a broad spectrum of applications in, e.g., gene or genome editing, gene therapy, drug discovery, drug screening, disease diagnosis, and prognosis.

[0011] Aspects of the invention relate to Cas9 enzymes having improved targeting specificity in a CRISPR-Cas9 system having guide RNAs having optimal activity, smaller in length than wild-type Cas9 enzymes and nucleic acid molecules coding therefor, and chimeric Cas9 enzymes, as well as methods of improving the target specificity of a Cas9 enzyme or of designing a CRISPR-Cas9 system comprising designing or preparing guide RNAs having optimal activity and/or selecting or preparing a Cas9 enzyme having a smaller size or length than wild-type Cas9 whereby packaging a nucleic acid coding therefor into a delivery vector is more advanced as there is less coding therefor in the delivery vector than for wild-type Cas9, and/or generating chimeric Cas9 enzymes.

[0012] Also provided are uses of the present sequences, vectors, enzymes or systems, in medicine. Also provided are uses of the same in gene or genome editing.

[0013] In an additional aspect of the invention, a Cas9 enzyme may comprise one or more mutations and may be used as a generic DNA binding protein with or without fusion to a functional domain. The mutations may be artificially introduced mutations or gain- or loss-of-function mutations. The mutations may include but are not limited to mutations in one of the catalytic domains (D10 and H840) in the RuvC and HNH catalytic domains, respectively. Further mutations have been characterized. In one aspect of the invention, the transcriptional activation domain may be VP64. In other aspects of the invention, the transcriptional repressor domain may be KRAB or SID4X. Other aspects of the invention relate to the mutated Cas9 enzyme being fused to domains which include but are not limited to a transcriptional activator, repressor, a recombinase, a transposase, a histone remodeler, a demethylase, a DNA methyltransferase, a cryptochrome, a light inducible/controllable domain or a chemically inducible/controllable domain.

[0014] In a further embodiment, the invention provides for methods to generate mutant tracrRNA and direct repeat sequences or mutant chimeric guide sequences that allow for enhancing performance of these RNAs in cells. Aspects of the invention also provide for selection of said sequences.

[0015] Aspects of the invention also provide for methods of simplifying the cloning and delivery of components of the CRISPR complex. In the preferred embodiment of the invention, a suitable promoter, such as the U6 promoter, is amplified with a DNA oligo and added onto the guide RNA. The resulting PCR product can then be transfected into cells to drive expression of the guide RNA. Aspects of the invention also relate to the guide RNA being transcribed in vitro or ordered from a synthesis company and directly transfected.

[0016] In one aspect, the invention provides for methods to improve activity by using a more active polymerase. In a preferred embodiment, the expression of guide RNAs under the control of the T7 promoter is driven by the expression of the T7 polymerase in the cell. In an advantageous embodiment, the cell is a eukaryotic cell. In a preferred embodiment the eukaryotic cell is a human cell. In a more preferred embodiment the human cell is a patient specific cell, e.g., a cell removed from a patient that may be modified and/or expanded into a cell population or a modified cell population, for instance, for re-administration to the patient . . .

[0017] In one aspect, the invention provides for methods of reducing the toxicity of Cas enzymes. In certain aspects, the Cas enzyme is any Cas9 as described herein, for instance any naturally-occurring bacterial Cas9 as well as any chimaeras, mutants, homologs or orthologs. In one aspect, the Cas enzyme is a nickase. In a preferred embodiment, the Cas9 is delivered into the cell in the form of mRNA. This allows for the transient expression of the enzyme thereby reducing toxicity. In another embodiment, the Cas9 is delivered into the cell in the nucleotide construct that encodes and expresses the Cas9 enzyme. In another preferred embodiment, the invention also provides for methods of expressing Cas9 under the control of an inducible promoter, and the constructs used therein.

[0018] In another aspect, the invention provides for methods of improving the in vivo applications of the CRISPR-Cas system. In the preferred embodiment, the Cas enzyme is wildtype Cas9 or any of the modified versions described herein, including any naturally-occurring bacterial Cas9 as well as any chimaeras, mutants, homologs or orthologs. In some methods of the invention the CRISPR enzyme comprises one or more mutations in one of the catalytic domains. In one aspect, the Cas enzyme is a nickase. An advantageous aspect of the invention provides for the selection of Cas9 homologs that are easily packaged into viral vectors for delivery. Cas9 orthologs typically share the general organization of 3-4 RuvC domains and a HNH domain. The 5′ most RuvC domain cleaves the non-complementary strand, and the HNH domain cleaves the complementary strand. All notations are in reference to the guide sequence.

[0019] The catalytic residue in 5′ RuvC domain is identified through homology comparison of the Cas9 of interest with other Cas9 orthologs (from S. pyogenes type II CRISPR locus, S. thermophilus CRISPR locus 1, S. thermophilus CRISPR locus 3, and Franciscilla novicida type II CRISPR locus), and the conserved Asp residue (D10) is mutated to alanine to convert Cas9 into a complementary-strand nicking enzyme. Similarly, the conserved His and Asn residues in the HNH domains are mutated to Alanine to convert Cas9 into a non-complementary-strand nicking enzyme. In some embodiments, both sets of mutations may be made, to convert Cas9 into a non-cutting enzyme.

[0020] In some embodiments, the CRISPR enzyme is a type I or III CRISPR enzyme, preferably a type II CRISPR enzyme. This type II CRISPR enzyme may be any Cas enzyme. A preferred Cas enzyme may be identified as Cas9 as this can refer to the general class of enzymes that share homology to the biggest nuclease with multiple nuclease domains from the type II CRISPR system. Most preferably, the Cas9 enzyme is from, or is derived from, spCas9 or saCas9. By derived, Applicants mean that the derived enzyme is largely based, in the sense of having a high degree of sequence homology with, a wildtype enzyme, but that it has been mutated (modified) in some way as described herein

[0021] It will be appreciated that the terms Cas and CRISPR enzyme are generally used herein interchangeably, unless otherwise apparent. As mentioned above, many of the residue numberings used herein refer to the Cas9 enzyme from the type II CRISPR locus in Streptococcus pyogenes. However, it will be appreciated that this invention includes many more Cas9s from other species of microbes, such as SpCas9, SaCas9, StlCas9 and so forth. Further examples are provided herein. The skilled person will be able to determine appropriate corresponding residues in Cas9 enzymes other than SpCas9 by comparison of the relevant amino acid sequences. Thus, where a specific amino acid replacement is referred to using the SpCas9 numbering, then, unless the context makes it apparent this is not intended to refer to other Cas9 enzymes, the disclosure is intended to encompass corresponding modifications in other Cas9 enzymes.

[0022] An example of a codon optimized sequence, in this instance optimized for humans (i.e. being optimized for expression in humans) is provided herein, see the SaCas9 human codon optimized sequence. Whilst this is preferred, it will be appreciated that other examples are possible and codon optimization for a host species is known.

[0023] In further embodiments, the invention provides for methods of enhancing the function of Cas9 by generating chimeric Cas9 proteins. Chimeric Cas9 proteins chimeric Cas9s may be new Cas9 containing fragments from more than one naturally occurring Cas9. These methods may comprise fusing N-terminal fragments of one Cas9 homolog with C-terminal fragments of another Cas9 homolog. These methods also allow for the selection of new properties displayed by the chimeric Cas9 proteins.

[0024] It will be appreciated that in the present methods, where the organism is an animal or a plant, the modification may occur ex vivo or in vitro, for instance in a cell culture and in some instances not in vivo. In other embodiments, it may occur in vivo.

[0025] In one aspect, the invention provides a method of modifying an organism or a non-human organism by manipulation of a target sequence in a genomic locus of interest (e.g. an integrated viral sequence) comprising:
[0026] delivering a non-naturally occurring or engineered composition comprising:
   [0027] A)—I. a CRISPR-Cas system chimeric RNA (chiRNA) polynucleotide sequence, wherein the polynucleotide sequence comprises:
      [0028] (a) a guide sequence capable of hybridizing to a target sequence in a eukaryotic cell,
      [0029] (b) a tracr mate sequence, and
      [0030] (c) a tracr sequence, and
   [0031] II. a polynucleotide sequence encoding a CRISPR enzyme comprising at least one or more nuclear localization sequences,
[0032] wherein (a), (b) and (c) are arranged in a 5′ to 3′ orientation,
[0033] wherein when transcribed, the tracr mate sequence hybridizes to the tracr sequence and the guide sequence directs sequence-specific binding of a CRISPR complex to the target sequence, and
[0034] wherein the CRISPR complex comprises the CRISPR enzyme complexed with (1) the guide sequence that is hybridized or hybridizable to the target sequence, and (2) the tracr mate sequence that is hybridized or hybridizable to the tracr sequence and the polynucleotide sequence encoding a CRISPR enzyme is DNA or RNA,
[0035] or
   [0036] (B) I. polynucleotides comprising:
      [0037] (a) a guide sequence capable of hybridizing to a target sequence in a eukaryotic cell, and
      [0038] (b) at least one or more tracr mate sequences,
   [0039] II. a polynucleotide sequence encoding a CRISPR enzyme, and
   [0040] III. a polynucleotide sequence comprising a tracr sequence,
[0041] wherein when transcribed, the tracr mate sequence hybridizes to the tracr sequence and the guide sequence directs sequence-specific binding of a CRISPR complex to the target sequence, and
[0042] wherein the CRISPR complex comprises the CRISPR enzyme complexed with (1) the guide sequence that is hybridized or hybridizable to the target sequence, and (2) the tracr mate sequence that is hybridized or hybridizable to the tracr sequence, and the polynucleotide sequence encoding a CRISPR enzyme is DNA or RNA.

[0043] Any or all of the polynucleotide sequence encoding a CRISPR enzyme, guide sequence, tracr mate sequence or tracr sequence, may be RNA. The polynucleotides encoding the sequence encoding a CRISPR enzyme, the guide sequence, tracr mate sequence or tracr sequence may be RNA and may be delivered via liposomes, nanoparticles, exosomes, microvesicles, or a gene-gun.

[0044] It will be appreciated that where reference is made to a polynucleotide, which is RNA and is said to ‘comprise’ a feature such a tracr mate sequence, the RNA sequence includes the feature. Where the polynucleotide is DNA and is said to comprise a feature such a tracr mate sequence, the DNA sequence is or can be transcribed into the RNA including the feature at issue. Where the feature is a protein, such as the CRISPR enzyme, the DNA or RNA sequence referred to is, or can be, translated (and in the case of DNA transcribed first).

[0045] Accordingly, in certain embodiments the invention provides a method of modifying an organism, e.g., mammal including human or a non-human mammal or organism by manipulation of a target sequence in a genomic locus of interest comprising delivering a non-naturally occurring or engineered composition comprising a viral or plasmid vector system comprising one or more viral or plasmid vectors operably encoding a composition for expression thereof, wherein the composition comprises: (A) a non-naturally occurring or engineered composition comprising a vector system comprising one or more vectors comprising I. a first regulatory element operably linked to a CRISPR-Cas system chimeric RNA (chiRNA) polynucleotide sequence, wherein the polynucleotide sequence comprises (a) a guide sequence capable of hybridizing to a target sequence in a eukaryotic cell, (b) a tracr mate sequence, and (c) a tracr sequence, and II. a second regulatory element operably linked to an enzyme-coding sequence encoding a CRISPR enzyme comprising at least one or more nuclear localization sequences (or optionally at least one or more nuclear localization sequences as some embodiments can involve no NLS), wherein (a), (b) and (c) are arranged in a 5′ to 3′ orientation, wherein components I and II are located on the same or different vectors of the system, wherein when transcribed, the tracr mate sequence hybridizes to the tracr sequence and the guide sequence directs sequence-specific binding of a CRISPR complex to the target sequence, and wherein the CRISPR complex comprises the CRISPR enzyme complexed with (1) the guide sequence that is hybridized or hybridizable to the target sequence, and (2) the tracr mate sequence that is hybridized or hybridizable to the tracr sequence, or (B) a non-naturally occurring or engineered composition comprising a vector system comprising one or more vectors comprising I. a first regulatory element operably linked to (a) a guide sequence capable of hybridizing to a target sequence in a eukaryotic cell, and (b) at least one or more tracr mate sequences, II. a second regulatory element operably linked to an enzyme-coding sequence encoding a CRISPR enzyme, and III. a third regulatory element operably linked to a tracr sequence, wherein components I, II and III are located on the same or different vectors of the system, wherein when transcribed, the tracr mate sequence hybridizes to the tracr sequence and the guide sequence directs sequence-specific binding of a CRISPR complex to the target sequence, and wherein the CRISPR complex comprises the CRISPR enzyme complexed with (1) the guide sequence that is hybridized or hybridizable to the target sequence, and (2) the tracr mate sequence that is hybridized or hybridizable to the tracr sequence. In some embodiments, components I, II and III are located on the same vector. In other embodiments, components I and II are located on the same vector, while component III is located on another vector. In other embodiments, components I and III are located on the same vector, while component II is located on another vector. In other embodiments, components II and III are located on the same vector, while component I is located on another vector. In other embodiments, each of components I, II and III is located on different vectors. The invention also provides a viral or plasmid vector system as described herein.

[0046] Preferably, the vector is a viral vector, such as a lenti- or baculo- or preferably adeno-viral/adeno-associated viral vectors, but other means of delivery are known (such as yeast systems, microvesicles, gene guns/means of attaching vectors to gold nanoparticles) and are provided. In some embodiments, one or more of the viral or plasmid vectors may be delivered via liposomes, nanoparticles, exosomes, microvesicles, or a gene-gun.

[0047] By manipulation of a target sequence, Applicants also mean the epigenetic manipulation of a target sequence. This may be of the chromatin state of a target sequence, such as by modification of the methylation state of the target sequence (i.e. addition or removal of methylation or methylation patterns or CpG islands), histone modification, increasing or reducing accessibility to the target sequence, or by promoting 3D folding. In relation to treatment of viral infections, however, excision of integrated viral genome sequences is the manipulation of primary interest.

[0048] It will be appreciated that where reference is made to a method of modifying an organism or mammal including human or a non-human mammal or organism by manipulation of a target sequence in a genomic locus of interest, this may apply to the organism (or mammal) as a whole or just a single cell or population of cells from that organism. In the case of humans, for instance, Applicants envisage, inter alia, a single cell or a population of cells and these may preferably be modified ex vivo and then re-introduced. In this case, a biopsy or other tissue or biological fluid sample may be necessary. Stem cells are also particularly preferred in this regard. But, of course, in vivo embodiments are also envisaged.

[0049] In certain embodiments the invention provides a method of treating or inhibiting a condition caused by the presence of an integrated viral sequence in a genomic locus of interest in a subject (e.g., mammal or human) or a non-human subject (e.g., mammal) in need thereof comprising modifying the subject or a non-human subject by manipulation of a target sequence in the integrated viral sequence and wherein the condition is susceptible to treatment or inhibition by manipulation of the target sequence comprising providing treatment comprising: delivering a non-naturally occurring or engineered composition comprising an AAV or lentivirus vector system comprising one or more AAV or lentivirus vectors operably encoding a composition for expression thereof, wherein the target sequence is manipulated by the composition when expressed, wherein the composition comprises: (A) a non-naturally occurring or engineered composition comprising a vector system comprising one or more vectors comprising I. a first regulatory element operably linked to a CRISPR-Cas system chimeric RNA (chiRNA) polynucleotide sequence, wherein the polynucleotide sequence comprises (a) a guide sequence capable of hybridizing to a target sequence in a eukaryotic cell, (b) a tracr mate sequence, and (c) a tracr sequence, and II. a second regulatory element operably linked to an enzyme-coding sequence encoding a CRISPR enzyme comprising at least one or more nuclear localization sequences (or optionally at least one or more nuclear localization sequences as some embodiments can involve no NLS, i.e., there can be zero NLSs but advantageously there is greater than zero NLSs, such as one or more or advantageously two or more NLSs, and thus the invention comprehends embodiments wherein there is 0, 1, 2, 3, or more NLSs) wherein (a), (b) and (c) are arranged in a 5′ to 3′ orientation, wherein components I and II are located on the same or different vectors of the system, wherein when transcribed, the tracr mate sequence hybridizes to the tracr sequence and the guide sequence directs sequence-specific binding of a CRISPR complex to the target sequence, and wherein the CRISPR complex comprises the CRISPR enzyme complexed with (1) the guide sequence that is hybridized or hybridizable to the target sequence, and (2) the tracr mate sequence that is hybridized or hybridizable to the tracr sequence, or (B) a non-naturally occurring or engineered composition comprising a vector system comprising one or more vectors comprising I. a first regulatory element operably linked to (a) a guide sequence capable of hybridizing to a target sequence in a eukaryotic cell, and (b) at least one or more tracr mate sequences, II. a second regulatory element operably linked to an enzyme-coding sequence encoding a CRISPR enzyme, and III. a third regulatory element operably linked to a tracr sequence, wherein components I, II and III are located on the same or different vectors of the system, wherein when transcribed, the tracr mate sequence hybridizes to the tracr sequence and the guide sequence directs sequence-specific binding of a CRISPR complex to the target sequence, and wherein the CRISPR complex comprises the CRISPR enzyme complexed with (1) the guide sequence that is hybridized or hybridizable to the target sequence, and (2) the tracr mate sequence that is hybridized or hybridizable to the tracr sequence. In some embodiments, components I, II and III are located on the same vector. In other embodiments, components I and II are located on the same vector, while component III is located on another vector. In other embodiments, components I and III are located on the same vector, while component II is located on another vector. In other embodiments, components II and III are located on the same vector, while component I is located on another vector. In other embodiments, each of components I, II and III is located on different vectors. The invention also provides a viral (e.g. AAV or lentivirus) vector system as described herein. Delivery therefore can be via a vector, such as a viral vector, e.g., a recombinant viral vector delivery system; and, this system can be an AAV or lentivirus or derived from an AAV or a lentivirus (e.g., a recombinant AAV or lentivirus that expresses that which is foreign, heterologous or that which is not homologous or native to the virus may make some consider the virus “derived from” is parent virus). In some methods of the invention the viral vector is a lentivirus-derived vector. In some methods of the invention the viral vector is an Agrobacterium Ti or Ri plasmid for use in plants.

[0050] The organism or subject is a eukaryote (including mammal including human) or a non-human eukaryote or a non-human animal or a non-human mammal. In some embodiments, the organism or subject is a non-human animal, and may be an arthropod, for example, an insect, or may be a nematode. In some methods of the invention the organism or subject is a plant. In some methods of the invention the organism or subject is a mammal or a non-human mammal. A non-human mammal may be for example a rodent (preferably a mouse or a rat), an ungulate, or a primate. In some methods of the invention the organism or subject is a plant or algae, including microalgae, or is a fungus. In some methods of the invention the viral vector is an AAV or a lentivirus, and can be part of a vector system as described herein. In some methods of the invention the CRISPR enzyme is a Cas9. In some methods of the invention the expression of the guide sequence is under the control of the T7 promoter and is driven by the expression of T7 polymerase. In some methods of the invention the expression of the guide sequence is under the control of a U6 promoter. In some methods of the invention the CRISPR enzyme comprises one or more mutations in one of the catalytic domains. In some methods of the invention the CRISPR enzyme is a Cas9 nickase.

[0051] The invention in some embodiments comprehends a method of delivering a CRISPR enzyme comprising delivering to a cell a nucleic acid molecule, e.g., DNA, RNA, mRNA encoding the CRISPR enzyme. In some of these methods the CRISPR enzyme is a Cas9. This allows for the transient expression of the enzyme thereby reducing toxicity. In another embodiment, the Cas9 is delivered into the cell in the nucleotide construct that encodes and expresses the Cas9 enzyme.

[0052] The invention also provides methods of preparing the vector systems of the invention, in particular the viral vector systems as described herein. The invention in some embodiments comprehends a method of preparing the AAV of the invention comprising transfecting plasmid(s) containing or consisting essentially of nucleic acid molecule(s) coding for the AAV into AAV-infected cells, and supplying AAV rep and/or cap obligatory for replication and packaging of the AAV. In some embodiments the AAV rep and/or cap obligatory for replication and packaging of the AAV are supplied by transfecting the cells with helper plasmid(s) or helper virus(es). In some embodiments the helper virus is a poxvirus, adenovirus, herpesvirus or baculovirus. In some embodiments the poxvirus is a vaccinia virus. In some embodiments the cells are mammalian cells. And in some embodiments the cells are insect cells and the helper virus is baculovirus. In other embodiments, the virus is a lentivirus.

[0053] In plants, viral pathogens are often host-specific, but this is not always the case. For instance, citrus tristeza virus infects only a few species in the Citrus genus, whereas cucumber mosaic virus infects over 1000 species in 85 plant families. Plants have existing and induced defenses to resist most pathogens, but the invention offers new ways to clear viral infections from plants.

[0054] The invention further comprehends a composition of the invention or a CRISPR enzyme thereof (including or alternatively mRNA encoding the CRISPR enzyme) for use in medicine or in therapy. In some embodiments the invention comprehends a composition according to the invention or a CRISPR enzyme thereof (including or alternatively a nucleic acid molecule, e.g., mRNA encoding the CRISPR enzyme) for use in a method according to the invention. In some embodiments the invention provides for the use of a composition of the invention or a CRISPR enzyme thereof (including or alternatively mRNA encoding the CRISPR enzyme) in ex vivo gene or genome editing. In certain embodiments the invention comprehends use of a composition of the invention or a CRISPR enzyme thereof (including or alternatively mRNA encoding the CRISPR enzyme) in the manufacture of a medicament for ex vivo gene or genome editing or for use in a method according of the invention. The invention thus also envisions a CRISPR-Cas Complex or a component thereof of any of any description herein for use in delivery to and/or a method of treating tissue, or tissue containing cells having a viral infection, such as Hepatitis B Virus; or in preparing or formulating a medicament or pharmaceutical composition for such treatment.

[0055] The invention comprehends in some embodiments a composition of the invention or a CRISPR enzyme thereof (including or alternatively mRNA encoding the CRISPR enzyme), wherein the target sequence is flanked at its 3′ end by a 5′ motif termed a proto-spacer adjacent motif or PAM, especially where the Cas9 is (or is derived from) S. pyogenes or S. aureus Cas9. For example, a suitable PAM is 5′-NRG or 5′-NNGRR (where N is any Nucleotide) for SpCas9 or SaCas9 enzymes (or derived enzymes), respectively, as mentioned below. For S. pyrogenes Cas9 or derived enzymes, a suitable PAM is 5′-NRG.

[0056] It will be appreciated that SpCas9 or SaCas9 are those from or derived from S. pyogenes or S. aureus Cas9.

[0057] Aspects of the invention comprehend improving the specificity of a CRISPR enzyme, e.g. Cas9, mediated gene targeting and reducing the likelihood of off-target modification by the CRISPR enzyme, e.g. Cas9. The invention in some embodiments comprehends a method of modifying an organism or a non-human organism by minimizing off-target modifications by manipulation of a first and a second target sequence on opposite strands of a DNA duplex in a genomic locus of interest in a cell comprising delivering a non-naturally occurring or engineered composition comprising:
[0058] I. a first CRISPR-Cas system chimeric RNA (chiRNA) polynucleotide sequence, wherein the first polynucleotide sequence comprises:
[0059] (a) a first guide sequence capable of hybridizing to the first target sequence,
[0060] (b) a first tracr mate sequence, and
[0061] (c) a first tracr sequence,
[0062] II. a second CRISPR-Cas system chiRNA polynucleotide sequence, wherein the second polynucleotide sequence comprises:
[0063] (a) a second guide sequence capable of hybridizing to the second target sequence,
[0064] (b) a second tracr mate sequence, and
[0065] (c) a second tracr sequence, and
[0066] III. a polynucleotide sequence encoding a CRISPR enzyme comprising at least one or more nuclear localization sequences and comprising one or more mutations, wherein (a), (b) and (c) are arranged in a 5′ to 3′ orientation, wherein when transcribed, the first and the second tracr mate sequence hybridize to the first and second tracr sequence respectively and the first and the second guide sequence directs sequence-specific binding of a first and a second CRISPR complex to the first and second target sequences respectively, wherein the first CRISPR complex comprises the CRISPR enzyme complexed with (1) the first guide sequence that is hybridized or hybridizable to the first target sequence, and (2) the first tracr mate sequence that is hybridized or hybridizable to the first tracr sequence, wherein the second CRISPR complex comprises the CRISPR enzyme complexed with (1) the second guide sequence that is hybridized or hybridizable to the second target sequence, and (2) the second tracr mate sequence that is hybridized or hybridizable to the second tracr sequence, wherein the polynucleotide sequence encoding a CRISPR enzyme is DNA or RNA, and wherein the first guide sequence directs cleavage of one strand of the DNA duplex near the first target sequence and the second guide sequence directs cleavage of the other strand near the second target sequence inducing a double strand break, thereby modifying the organism or the non-human organism by minimizing off-target modifications. In one aspect, the first nick and the second nick in the DNA is offset relative to each other by at least one base pair of the duplex. In one aspect, the first nick and the second nick are offset relative to each other so that the resulting DNA break has a 3′ overhang. In one aspect, the first nick and the second nick are offset relative to each other so that the resulting DNA break has a 5′ overhang. In one aspect, the first nick and the second nick are positioned relative to each other such that the overhang is at least 1 nucleotide (nt), at least 10 nt, at least 15 nt, at least 26 nt, at least 30 nt, at least 50 nt or more that at least 50 nt. Additional aspects of the invention comprising the resulting offset double nicked DNA strand can be appreciated by one skilled in the art, and exemplary uses of the double nick system are provided herein.

[0067] In some methods of the invention any or all of the polynucleotide sequence encoding the CRISPR enzyme, the first and the second guide sequence, the first and the second tracr mate sequence or the first and the second tracr sequence, is/are RNA. In further embodiments of the invention the polynucleotides encoding the sequence encoding the CRISPR enzyme, the first and the second guide sequence, the first and the second tracr mate sequence or the first and the second tracr sequence, is/are RNA and are delivered via liposomes, nanoparticles, exosomes, microvesicles, or a gene-gun. In certain embodiments of the invention, the first and second tracr mate sequence share 100% identity and/or the first and second tracr sequence share 100% identity. In some embodiments, the polynucleotides may be comprised within a vector system comprising one or more vectors. In preferred embodiments of the invention the CRISPR enzyme is a Cas9 enzyme, e.g. SpCas9. In an aspect of the invention the CRISPR enzyme comprises one or more mutations in a catalytic domain, wherein the one or more mutations are selected from the group consisting of D10A, E762A, H840A, N854A, N863A and D986A. In a highly preferred embodiment the CRISPR enzyme has the D10A mutation. In preferred embodiments, the first CRISPR enzyme has one or more mutations such that the enzyme is a complementary strand nicking enzyme, and the second CRISPR enzyme has one or more mutations such that the enzyme is a non-complementary strand nicking enzyme. Alternatively the first enzyme may be a non-complementary strand nicking enzyme, and the second enzyme may be a complementary strand nicking enzyme.

[0068] With respect to mutations of the CRISPR enzyme, when the enzyme is not SpCas9, mutations may be made at any or all residues corresponding to positions 10, 762, 840, 854, 863 and/or 986 of SpCas9 (which may be ascertained for instance by standard sequence comparison tools). In particular, any or all of the following mutations are preferred in SpCas9: D10A, E762A, H840A, N854A, N863A and/or D986A; as well as conservative substitution for any of the replacement amino acids is also envisaged. In an aspect the invention provides as to any or each or all embodiments herein-discussed wherein the CRISPR enzyme comprises at least one or more, or at least two or more mutations, wherein the at least one or more mutation or the at least two or more mutations is as to D10, E762, H840, N854, N863, or D986 according to SpCas9 protein, e.g., D10A, E762A, H840A, N854A, N863A and/or D986A as to SpCas9, or N580 according to SaCas9, e.g., N580A as to SaCas9, or any corresponding mutation(s) in a Cas9 of an ortholog to Sp or Sa, or the CRISPR enzyme comprises at least one mutation wherein at least H840 or N863A as to Sp Cas9 or N580A as to Sa Cas9 is mutated; e.g., wherein the CRISPR enzyme comprises H840A, or D10A and H840A, or D10A and N863A, according to SpCas9 protein, or any corresponding mutation(s) in a Cas9 of an ortholog to Sp protein or Sa protein.

[0069] In preferred methods of the invention the first guide sequence directing cleavage of one strand of the DNA duplex near the first target sequence and the second guide sequence directing cleavage of the other strand near the second target sequence results in a 5′ overhang. In embodiments of the invention 5′ overhang is at most 200 base pairs, preferably at most 100 base pairs, or more preferably at most 50 base pairs. In embodiments of the invention 5′ overhang is at least 26 base pairs, preferably at least 30 base pairs or more preferably 34-50 base pairs.

[0070] The invention in some embodiments comprehends a method of modifying an organism or a non-human organism by minimizing off-target modifications by manipulation of a first and a second target sequence on opposite strands of a DNA duplex in a genomic locus of interest in a cell comprising delivering a non-naturally occurring or engineered composition comprising a vector system comprising one or more vectors comprising
[0071] I. a first regulatory element operably linked to
[0072] (a) a first guide sequence capable of hybridizing to the first target sequence, and
[0073] (b) at least one or more tracr mate sequences,
[0074] II. a second regulatory element operably linked to
[0075] (a) a second guide sequence capable of hybridizing to the second target sequence, and
[0076] (b) at least one or more tracr mate sequences,
[0077] III. a third regulatory element operably linked to an enzyme-coding sequence encoding a CRISPR enzyme, and
[0078] IV. a fourth regulatory element operably linked to a tracr sequence,
[0079] wherein components I, II, III and IV are located on the same or different vectors of the system, when transcribed, the tracr mate sequence hybridizes to the tracr sequence and the first and the second guide sequence direct sequence-specific binding of a first and a second CRISPR complex to the first and second target sequences respectively, wherein the first CRISPR complex comprises the CRISPR enzyme complexed with (1) the first guide sequence that is hybridized or hybridizable to the first target sequence, and (2) the tracr mate sequence that is hybridized or hybridizable to the tracr sequence, wherein the second CRISPR complex comprises the CRISPR enzyme complexed with (1) the second guide sequence that is hybridized or hybridizable to the second target sequence, and (2) the tracr mate sequence that is hybridized or hybridizable to the tracr sequence, wherein the polynucleotide sequence encoding a CRISPR enzyme is DNA or RNA, and wherein the first guide sequence directs cleavage of one strand of the DNA duplex near the first target sequence and the second guide sequence directs cleavage of the other strand near the second target sequence inducing a double strand break, thereby modifying the organism or the non-human organism by minimizing off-target modifications.

[0080] The invention also provides a vector system as described herein. The system may comprise one, two, three or four different vectors. Components I, II, III and IV may thus be located on one, two, three or four different vectors, and all combinations for possible locations of the components are herein envisaged, for example: components I, II, III and IV can be located on the same vector; components I, II, III and IV can each be located on different vectors; components I, II, II I and IV may be located on a total of two or three different vectors, with all combinations of locations envisaged, etc.

[0081] In some methods of the invention any or all of the polynucleotide sequence encoding the CRISPR enzyme, the first and the second guide sequence, the first and the second tracr mate sequence or the first and the second tracr sequence, is/are RNA. In further embodiments of the invention the first and second tracr mate sequence share 100% identity and/or the first and second tracr sequence share 100% identity. In preferred embodiments of the invention the CRISPR enzyme is a Cas9 enzyme, e.g. SpCas9. In an aspect of the invention the CRISPR enzyme comprises one or more mutations in a catalytic domain, wherein the one or more mutations are selected from the group consisting of D10A, E762A, H840A, N854A, N863A and D986A. In a highly preferred embodiment the CRISPR enzyme has the D10A mutation. In preferred embodiments, the first CRISPR enzyme has one or more mutations such that the enzyme is a complementary strand nicking enzyme, and the second CRISPR enzyme has one or more mutations such that the enzyme is a non-complementary strand nicking enzyme. Alternatively the first enzyme may be a non-complementary strand nicking enzyme, and the second enzyme may be a complementary strand nicking enzyme. In a further embodiment of the invention, one or more of the viral vectors are delivered via liposomes, nanoparticles, exosomes, microvesicles, or a gene-gun.

[0082] In preferred methods of the invention the first guide sequence directing cleavage of one strand of the DNA duplex near the first target sequence and the second guide sequence directing cleavage of other strand near the second target sequence results in a 5′ overhang. In embodiments of the invention 5′ overhang is at most 200 base pairs, preferably at most 100 base pairs, or more preferably at most 50 base pairs. In embodiments of the invention 5′ overhang is at least 26 base pairs, preferably at least 30 base pairs or more preferably 34-50 base pairs.

[0083] The invention in some embodiments comprehends a method of modifying a genomic locus of interest by minimizing off-target modifications by introducing into a cell containing and expressing a double stranded DNA molecule encoding a gene product of interest an engineered, non-naturally occurring CRISPR-Cas system comprising a Cas protein having one or more mutations and two guide RNAs that target a first strand and a second strand of the DNA molecule respectively, whereby the guide RNAs target the DNA molecule encoding the gene product and the Cas protein nicks each of the first strand and the second strand of the DNA molecule encoding the gene product, whereby expression of the gene product is altered; and, wherein the Cas protein and the two guide RNAs do not naturally occur together.

[0084] In preferred methods of the invention the Cas protein nicking each of the first strand and the second strand of the DNA molecule encoding the gene product results in a 5′ overhang. In embodiments of the invention 5′ overhang is at most 200 base pairs, preferably at most 100 base pairs, or more preferably at most 50 base pairs. In embodiments of the invention 5′ overhang is at least 26 base pairs, preferably at least 30 base pairs or more preferably 34-50 base pairs.

[0085] Embodiments of the invention also comprehend the guide RNAs comprising a guide sequence fused to a tracr mate sequence and a tracr sequence. In an aspect of the invention the Cas protein is codon optimized for expression in a eukaryotic cell, preferably a mammalian cell or a human cell. As explained in more detail below, codon usage can even be optimized for expression in particular cell types e.g. for liver cells. In further embodiments of the invention the Cas protein is a type II CRISPR-Cas protein, e.g. a Cas9 protein. In a highly preferred embodiment the Cas protein is a Cas9 protein, e.g. SpCas9. In aspects of the invention the Cas protein has one or more mutations selected from the group consisting of D10A, E762A, H840A, N854A, N863A and D986A. In a highly preferred embodiment the Cas protein has the D10A mutation.

[0086] Aspects of the invention relate to the expression of the gene product being decreased or a template polynucleotide being further introduced into the DNA molecule encoding the gene product or an intervening sequence being excised precisely by allowing the two 5′ overhangs to reanneal and ligate or the activity or function of the gene product being altered or the expression of the gene product being increased. In an embodiment of the invention, the gene product is a protein.

[0087] The invention also comprehends an engineered, non-naturally occurring CRISPR-Cas system comprising a Cas protein having one or more mutations and two guide RNAs that target a first strand and a second strand respectively of a double stranded DNA molecule encoding a gene product in a cell, whereby the guide RNAs target the DNA molecule encoding the gene product and the Cas protein nicks each of the first strand and the second strand of the DNA molecule encoding the gene product, whereby expression of the gene product is altered; and, wherein the Cas protein and the two guide RNAs do not naturally occur together.

[0088] In aspects of the invention the guide RNAs may comprise a guide sequence fused to a tracr mate sequence and a tracr sequence. In an embodiment of the invention the Cas protein is a type II CRISPR-Cas protein. In an aspect of the invention the Cas protein is codon optimized for expression in a eukaryotic cell, preferably a mammalian cell or a human cell. In further embodiments of the invention the Cas protein is a type II CRISPR-Cas protein, e.g. a Cas9 protein. In a highly preferred embodiment the Cas protein is a Cas9 protein, e.g. SpCas9. In aspects of the invention the Cas protein has one or more mutations selected from the group consisting of D10A, E762A, H840A, N854A, N863A and D986A. In a highly preferred embodiment the Cas protein has the D10A mutation.

[0089] Aspects of the invention relate to the expression of the gene product being decreased or a template polynucleotide being further introduced into the DNA molecule encoding the gene product or an intervening sequence being excised precisely by allowing the two 5′ overhangs to reanneal and ligate or the activity or function of the gene product being altered or the expression of the gene product being increased. In an embodiment of the invention, the gene product is a protein.

[0090] The invention also comprehends an engineered, non-naturally occurring vector system comprising one or more vectors comprising:
[0091] a) a first regulatory element operably linked to each of two CRISPR-Cas system guide RNAs that target a first strand and a second strand respectively of a double stranded DNA molecule encoding a gene product,
[0092] b) a second regulatory element operably linked to a Cas protein,
   wherein components (a) and (b) are located on same or different vectors of the system, whereby the guide RNAs target the DNA molecule encoding the gene product and the Cas protein nicks each of the first strand and the second strand of the DNA molecule encoding the gene product, whereby expression of the gene product is altered; and, wherein the Cas protein and the two guide RNAs do not naturally occur together.

[0093] In aspects of the invention the guide RNAs may comprise a guide sequence fused to a tracr mate sequence and a tracr sequence. In an embodiment of the invention the Cas protein is a type II CRISPR-Cas protein. In an aspect of the invention the Cas protein is codon optimized for expression in a eukaryotic cell, preferably a mammalian cell or a human cell. In further embodiments of the invention the Cas protein is a type II CRISPR-Cas protein, e.g. a Cas9 protein. In a highly preferred embodiment the Cas protein is a Cas9 protein, e.g. SpCas9. In aspects of the invention the Cas protein has one or more mutations selected from the group consisting of D10A, E762A, H840A, N854A, N863A and D986A. In a highly preferred embodiment the Cas protein has the D10A mutation.

[0094] Aspects of the invention relate to the expression of the gene product being decreased or a template polynucleotide being further introduced into the DNA molecule encoding the gene product or an intervening sequence being excised precisely by allowing the two 5′ overhangs to reanneal and ligate or the activity or function of the gene product being altered or the expression of the gene product being increased. In an embodiment of the invention, the gene product is a protein. In preferred embodiments of the invention the vectors of the system are viral vectors. In a further embodiment, the vectors of the system are delivered via liposomes, nanoparticles, exosomes, microvesicles, or a gene-gun.

[0095] In one aspect, the invention provides a method of modifying a target polynucleotide in a eukaryotic cell. In some embodiments, the method comprises allowing a CRISPR complex to bind to the target polynucleotide to effect cleavage of said target polynucleotide thereby modifying the target polynucleotide, wherein the CRISPR complex comprises a CRISPR enzyme complexed with a guide sequence hybridized or hybridizable to a target sequence within said target polynucleotide, wherein said guide sequence is linked to a tracr mate sequence which in turn hybridizes to a tracr sequence. In some embodiments, said cleavage comprises cleaving one or two strands at the location of the target sequence by said CRISPR enzyme. In some embodiments, said cleavage results in decreased transcription of a target gene. In some embodiments, the method further comprises repairing said cleaved target polynucleotide by homologous recombination with an exogenous template polynucleotide, wherein said repair results in a mutation comprising an insertion, deletion, or substitution of one or more nucleotides of said target polynucleotide. In some embodiments, said mutation results in one or more amino acid changes in a protein expressed from a gene comprising the target sequence. In some embodiments, the method further comprises delivering one or more vectors to said eukaryotic cell, wherein the one or more vectors drive expression of one or more of: the CRISPR enzyme, the guide sequence linked to the tracr mate sequence, and the tracr sequence. In some embodiments, said vectors are delivered to the eukaryotic cell in a subject. In some embodiments, said modifying takes place in said eukaryotic cell in a cell culture. In some embodiments, the method further comprises isolating said eukaryotic cell from a subject prior to said modifying. In some embodiments, the method further comprises returning said eukaryotic cell and/or cells derived therefrom to said subject.

[0096] In one aspect, the invention provides a method of modifying expression of a polynucleotide in a eukaryotic cell. In some embodiments, the method comprises allowing a CRISPR complex to bind to the polynucleotide such that said binding results in increased or decreased expression of said polynucleotide; wherein the CRISPR complex comprises a CRISPR enzyme complexed with a guide sequence hybridized or hybridizable to a target sequence within said polynucleotide, wherein said guide sequence is linked to a tracr mate sequence which in turn hybridizes to a tracr sequence. In some embodiments, the method further comprises delivering one or more vectors to said eukaryotic cells, wherein the one or more vectors drive expression of one or more of: the CRISPR enzyme, the guide sequence linked to the tracr mate sequence, and the tracr sequence.

[0097] In one aspect, the invention provides for methods of modifying a target polynucleotide in a eukaryotic cell. In some embodiments, the method comprises allowing a CRISPR complex to bind to the target polynucleotide to effect cleavage of said target polynucleotide thereby modifying the target polynucleotide, wherein the CRISPR complex comprises a CRISPR enzyme complexed with a guide sequence hybridized or hybridizable to a target sequence within said target polynucleotide, wherein said guide sequence is linked to a tracr mate sequence which in turn hybridizes to a tracr sequence.

[0098] In other embodiments, this invention provides a method of modifying expression of a polynucleotide in a eukaryotic cell. The method comprises decreasing expression of a target polynucleotide by using a CRISPR complex that binds to the polynucleotide.

[0099] Where desired, to effect the modification of the expression in a cell, one or more vectors comprising a tracr sequence, a guide sequence linked to the tracr mate sequence, a sequence encoding a CRISPR enzyme is delivered to a cell. In some methods, the one or more vectors comprises a regulatory element operably linked to an enzyme-coding sequence encoding said CRISPR enzyme comprising a nuclear localization sequence; and a regulatory element operably linked to a tracr mate sequence and one or more insertion sites for inserting a guide sequence upstream of the tracr mate sequence. When expressed, the guide sequence directs sequence-specific binding of a CRISPR complex to a target sequence in a cell. Typically, the CRISPR complex comprises a CRISPR enzyme complexed with (1) the guide sequence that is hybridized or hybridizable to the target sequence, and (2) the tracr mate sequence that is hybridized or hybridizable to the tracr sequence.

[0100] In some methods, a target polynucleotide can be inactivated to effect the modification of the expression in a cell. For example, upon the binding of a CRISPR complex to a target sequence in a cell, the target polynucleotide is inactivated such that the sequence is not transcribed, the coded protein is not produced, or the sequence does not function as the wild-type sequence does. For example, a protein or microRNA coding sequence may be inactivated such that the protein or microRNA is not produced.

[0101] In certain embodiments, the CRISPR enzyme comprises one or more mutations selected from the group consisting of D10A, E762A, H840A, N854A, N863A or D986A and/or the one or more mutations is in a RuvC1 or HNH domain of the CRISPR enzyme or is a mutation as otherwise as discussed herein. In some embodiments, the CRISPR enzyme has one or more mutations in a catalytic domain, wherein when transcribed, the tracr mate sequence hybridizes to the tracr sequence and the guide sequence directs sequence-specific binding of a CRISPR complex to the target sequence, and wherein the enzyme further comprises a functional domain. In some embodiments, the functional domain is a transcriptional activation domain, preferably VP64. In some embodiments, the functional domain is a transcription repression domain, preferably KRAB. In some embodiments, the transcription repression domain is SID, or concatemers of SID (eg SID4X). In some embodiments, the functional domain is an epigenetic modifying domain, such that an epigenetic modifying enzyme is provided. In some embodiments, the functional domain is an activation domain, which may be the P65 activation domain. Thus, in some embodiments a mutated Cas9 enzyme may be fused to a protein domain or functional domain.

[0102] In some embodiments, the CRISPR enzyme is a type I or III CRISPR enzyme, but is preferably a type II CRISPR enzyme. This type II CRISPR enzyme may be any Cas enzyme. A Cas enzyme may be identified as Cas9 as this can refer to the general class of enzymes that share homology to the biggest nuclease with multiple nuclease domains from the type II CRISPR system. Most preferably, the Cas9 enzyme is from, or is derived from, spCas9 or saCas9. By derived, Applicants mean that the derived enzyme is largely based, in the sense of having a high degree of sequence homology with, a wildtype enzyme, but that it has been mutated (modified) in some way as described herein.

[0103] It will be appreciated that the terms Cas and CRISPR enzyme are generally used herein interchangeably, unless otherwise apparent. As mentioned above, many of the residue numberings used herein refer to the Cas9 enzyme from the type II CRISPR locus in Streptococcus pyogenes. However, it will be appreciated that this invention includes many more Cas9s from other species of microbes, such as SpCas9, SaCa9, StlCas9 and so forth.

[0104] An example of a codon optimized sequence, in this instance optimized for humans (i.e. being optimized for expression in humans) is provided herein, see the SaCas9 human codon optimized sequence. Whilst this is preferred, it will be appreciated that other examples are possible and codon optimization for a host species is known.

[0105] Preferably, delivery is in the form of a vector which may be a viral vector, such as a lenti- or baculo- or preferably adeno-viral/adeno-associated viral vectors, but other means of delivery are known (such as yeast systems, microvesicles, gene guns/means of attaching vectors to gold nanoparticles) and are provided. A vector may mean not only a viral or yeast system (for instance, where the nucleic acids of interest may be operably linked to and under the control of (in terms of expression, such as to ultimately provide a processed RNA) a promoter), but also direct delivery of nucleic acids into a host cell. While in herein methods the vector may be a viral vector and this is advantageously an AAV, other viral vectors as herein discussed can be employed, such as lentivirus. For example, baculoviruses may be used for expression in insect cells. These insect cells may, in turn be useful for producing large quantities of further vectors, such as AAV or lentivirus vectors adapted for delivery of the present invention. Also envisaged is a method of delivering the present CRISPR enzyme comprising delivering to a cell mRNA encoding the CRISPR enzyme. It will be appreciated that in certain embodiments the CRISPR enzyme is truncated, and/or comprised of less than one thousand amino acids or less than four thousand amino acids, and/or is a nuclease or nickase, and/or is codon-optimized, and/or comprises one or more mutations, and/or comprises a chimeric CRISPR enzyme, and/or the other options as herein discussed. AAV and lentiviral vectors are preferred.

[0106] In certain embodiments, the target sequence is flanked or followed, at its 3′ end, by a PAM suitable for the CRISPR enzyme, typically a Cas and in particular a Cas9.

[0107] For example, a suitable PAM is 5′-NRG or 5′-NNGRR for SpCas9 or SaCas9 enzymes (or derived enzymes), respectively.

[0108] The invention also relates to a method of modifying a cell of a eukaryotic organism by manipulating at least one target viral nucleic acid within the cell, the method comprising introducing into the cell an exogenous composition capable of forming a Clustered Regularly Interspersed Short Palindromic Repeats (CRISPR)-CRISPR-associated (Cas) (CRISPR-Cas) complex, the composition comprising:
[0109] (A) CRISPR-Cas system polynucleotide sequences comprising:
   [0110] (i) a guide sequence, which when transcribed is capable of hybridizing to a sequence of the at least one target viral nucleic acid to be manipulated;
   [0111] (ii) a trans-activating CRISPR RNA (tracr) mate sequence, which is linked to the guide sequence; and
   [0112] (iii) a tracr sequence, wherein when transcribed all or a portion of the tracr sequence is capable of hybridizing to the tracr mate sequence; and
[0113] (B) a CRISPR/Cas enzyme or a polynucleotide encoding a CRISPR/Cas enzyme,
   wherein when the CRISPR/Cas system polynucleotide sequences are present as RNA within the cell and the CRISPR/Cas enzyme is present as a protein within the cell:
[0114] (i) the tracr mate sequence is hybridized to the tracr sequence or portion thereof;
[0115] (ii) the CRISPR/Cas system polynucleotide sequences are associated with the CRISPR/Cas enzyme, so forming a CRISPR/Cas complex; and
[0116] (iii) the guide sequence hybridizes to a sequence of the at least one target viral nucleic acid thereby directing sequence-specific binding of the CRISPR/Cas complex to the at least one sequence of the target viral nucleic acid, whereupon said sequence of said target viral nucleic acid is manipulated by the CRISPR/Cas enzyme of the complex.

[0117] The invention also relates to an exogenous composition which, when introduced into a cell of a eukaryotic organism, is capable of forming at least one Clustered Regularly Interspersed Short Palindromic Repeats (CRISPR)-CRISPR-associated (Cas) (CRISPR-Cas) complex, wherein the complex is capable of modifying the cell by manipulating of at least one target viral nucleic acid within the cell, the composition comprising:
[0118] (A) Clustered Regularly Interspersed Short Palindromic Repeats (CRISPR)-CRISPR associated (Cas) (CRISPR-Cas) system polynucleotide sequences comprising:
   [0119] (i) a guide sequence, which when transcribed is capable of hybridizing to a sequence of the at least one target viral nucleic acid to be manipulated;
   [0120] (ii) a trans-activating CRISPR RNA (tracr) mate sequence, which is linked to the guide sequence; and
   [0121] (iii) a tracr sequence, wherein when transcribed all or a portion of the tracr sequence is capable of hybridizing with the tracr mate sequence; and
[0122] (B) a CRISPR/Cas enzyme or a polynucleotide encoding a CRISPR/Cas enzyme,
   wherein when the CRISPR/Cas system polynucleotide sequences are present as RNA within the cell and the CRISPR/Cas enzyme is present as a protein within the cell:
[0123] (i) the tracr mate sequence is hybridized to the tracr sequence or portion thereof;
[0124] (ii) the CRISPR/Cas system polynucleotide sequences are associated with the CRISPR/Cas enzyme, so forming a CRISPR/Cas complex; and
[0125] (iii) the guide sequence hybridizes to a sequence of the at least one target viral nucleic acid thereby directing sequence-specific binding of the CRISPR/Cas complex to the at least one sequence of the target viral nucleic acid, whereupon said sequence of said target viral nucleic acid is manipulated by the CRISPR/Cas enzyme of the complex.

[0126] The invention also relates to a Clustered Regularly Interspersed Short Palindromic Repeats (CRISPR)-CRISPR-associated (Cas) (CRISPR-Cas) complex which, when introduced into a cell of a eukaryotic organism, is capable of modifying the cell by manipulating a target viral nucleic acid within the cell, the complex comprising:
[0127] (A) CRISPR-Cas system RNA polynucleotide sequences comprising:
   [0128] (i) a guide sequence, which is capable of hybridizing to a sequence of the target viral nucleic acid to be manipulated;
   [0129] (ii) a trans-activating CRISPR RNA (tracr) mate sequence, which is linked to the guide sequence; and
   [0130] (iii) a tracr sequence, wherein all or a portion of the tracr sequence is capable of hybridizing with the tracr mate sequence; and
[0131] (B) a CRISPR/Cas enzyme,
   wherein when the CRISPR/Cas system RNA polynucleotide sequences and the CRISPR/Cas enzyme are present within the cell:
[0132] (i) the tracr mate sequence is hybridized to the tracr sequence or portion thereof;
[0133] (ii) the CRISPR/Cas system polynucleotide sequences are associated with the CRISPR/Cas enzyme, so forming a CRISPR/Cas complex; and
[0134] (iii) the guide sequence hybridizes to a sequence of the target viral nucleic acid thereby directing sequence-specific binding of the CRISPR/Cas complex to the sequence of the target viral nucleic acid, whereupon said sequence of said target viral nucleic acid is manipulated by the CRISPR/Cas enzyme of the complex.

[0135] The invention also relates to a Clustered Regularly Interspersed Short Palindromic Repeats (CRISPR)-CRISPR-associated (Cas) (CRISPR-Cas) system chimeric RNA polynucleotide molecule (chiRNA) which, when introduced into a cell of a eukaryotic organism, is capable of associating with a CRISPR/Cas enzyme so forming a CRISPR-Cas complex, wherein the CRISPR-Cas complex is capable of modifying the cell by manipulating a target viral nucleic acid within the cell; the chiRNA comprising:
[0136] (i) a guide sequence, which is capable of hybridizing to a sequence of the target viral nucleic acid to be manipulated;
[0137] (ii) a trans-activating CRISPR RNA (tracr) mate sequence, which is linked to the guide sequence; and
[0138] (iii) a tracr sequence, wherein all or a portion of the tracr sequence is capable of hybridizing with the tracr mate sequence; and
   wherein when the chiRNA and the CRISPR/Cas enzyme are present within the cell:
[0139] a) the tracr mate sequence hybridizes to the tracr sequence or portion thereof;
[0140] b) the chiRNA associates with the CRISPR/Cas enzyme, so forming the CRISPR/Cas complex; and
[0141] c) the guide sequence hybridizes to a sequence of the target viral nucleic acid thereby directing sequence-specific binding of the CRISPR/Cas complex to the sequence of the target viral nucleic acid whereupon said sequence of said target viral nucleic acid is manipulated by the CRISPR/Cas enzyme of the complex.

[0142] The invention also relates to a DNA polynucleotide molecule comprising sequences encoding a Clustered Regularly Interspersed Short Palindromic Repeats (CRISPR)-CRISPR-associated (Cas) (CRISPR-Cas) system chimeric RNA polynucleotide molecule (chiRNA), wherein upon introduction of said chiRNA into a cell of a eukaryotic organism said chiRNA is capable of associating with a CRISPR/Cas enzyme so forming a CRISPR-Cas complex, wherein the CRISPR-Cas complex is capable of modifying the cell by manipulating a target viral nucleic acid within the cell; the chiRNA comprising:
[0143] (i) a guide sequence, which is capable of hybridizing to a sequence of the target viral nucleic acid to be manipulated;
[0144] (ii) a trans-activating CRISPR RNA (tracr) mate sequence, which is linked to the guide sequence; and
[0145] (iii) a tracr sequence, wherein all or a portion of the tracr sequence is capable of hybridizing with the tracr mate sequence; and
   wherein when the chiRNA and the CRISPR/Cas enzyme are present within the cell:
[0146] a) the tracr mate sequence hybridizes to the tracr sequence or portion thereof;
[0147] b) the chiRNA associates with the CRISPR/Cas enzyme, so forming the CRISPR/Cas complex; and
[0148] c) the guide sequence hybridizes to a sequence of the target viral nucleic acid thereby directing sequence-specific binding of the CRISPR/Cas complex to the sequence of the target viral nucleic acid whereupon said sequence of said target viral nucleic acid is manipulated by the CRISPR/Cas enzyme of the complex.

[0149] In embodiments described herein the guide sequence as described herein, which is capable of hybridizing to a sequence of a target nucleic acid to be manipulated, and the tracr mate sequence, as described herein, may preferably be linked in a tandem arrangement, wherein the tracr mate sequence comprises a region of sense sequence. The tracr sequence, as described herein, may comprise a region of antisense sequence which is capable of hybridizing with the region of sense sequence of the tracr mate sequence.

[0150] Preferably, when the tracr mate sequence (linked to the guide sequence) and the tracr sequence are present within the cell, the region of antisense sequence is hybridized to the region of sense sequence thereby forming a dual RNA molecule; and wherein when said dual RNA molecule binds within the cell to the CRISPR/Cas enzyme so forming a CRISPR-Cas complex, the guide sequence hybridizes to a sequence of the target nucleic acid thereby directing sequence-specific binding of the CRISPR/Cas complex to the target nucleic acid, whereupon manipulation of said sequence of said target nucleic acid is effected by the CRISPR/Cas enzyme of the complex.

[0151] As described herein certain embodiments may optionally comprise a chimeric single guide RNA molecule (sgRNA). Such sgRNA molecules may preferably comprise, in a tandem arrangement:
[0152] I a guide sequence, as described herein, which is capable of hybridizing to a sequence of the target nucleic acid to be manipulated;
[0153] II. a tracr mate sequence, as described herein, comprising a region of sense sequence;
[0154] III. a linker sequence; and
[0155] IV. a tracr sequence, as described herein, comprising a region of antisense sequence which is positioned adjacent the linker sequence and which is capable of hybridizing with the region of sense sequence thereby forming a stem-loop.

[0156] In such cases the linker may be a polynucleotide linker, optionally comprising GAAA. Other linkers, such as those described herein, are envisaged. Preferably, in any such cases when the sgRNA molecule is present within the cell, the region of antisense sequence is hybridized to the region of sense sequence thereby forming the stem-loop; and wherein when said sgRNA molecule binds within the cell to the CRISPR/Cas enzyme so forming a CRISPR-Cas complex, the guide sequence hybridizes to a sequence of the target nucleic acid thereby directing sequence-specific binding of the CRISPR/Cas complex to the target nucleic acid, whereupon manipulation of said sequence of said target nucleic acid is effected by the CRISPR/Cas enzyme of the complex.

[0157] In the embodiments described herein the guide sequence, the trans-activating CRISPR RNA (tracr) mate sequence and the tracr sequence may be non-coding sequences. When transcribed, the tracr mate sequence may not be capable of hybridizing to a sequence of the at least one target viral nucleic acid to be manipulated, in contrast to the guide sequence.

[0158] As described herein, various manipulations of target viral nucleic acids may be performed by the CRISPR/Cas complexes described herein. Preferred manipulations of target viral nucleic acids include cleavage of viral DNA, as described in more detail herein.

[0159] In certain methods, compositions, complexes, chiRNAs or DNA polynucleotide molecules described herein, manipulation of at least one target viral nucleic acid within the cell is performed. However, as will be apparent, multiplexing methods are described and exemplified wherein multiple target viral nucleic acid sequences are manipulated by CRISPR/Cas complexes targeting different sequences of the target viral nucleic acid.

[0160] In the methods, compositions, complexes, chiRNAs or DNA polynucleotides described herein an “exogenous composition” is an engineered or non-naturally occurring composition.

[0161] As noted herein, the target sequence may be flanked or followed, at its 3′ end, by a protospacer adjacent motif (PAM) suitable for recognition by the CRISPR enzyme of the complex, typically a Cas enzyme and more typically a Cas9 enzyme. For example, a suitable PAM is 5′-NRG or 5′-NNGRR for SpCas9 or SaCas9 enzymes (or derived enzymes), respectively. Other PAMs, such as are described herein, may be recognized in association with the target sequence depending upon the specific CRISPR enzyme used.

[0162] The CRISPR/Cas enzyme of the exogenous composition may be provided as a polynucleotide sequence which comprises either (a) RNA or (b) DNA wherein the polynucleotide sequence is operably linked to a regulatory element capable of directing expression of RNA encoding the CRISPR/Cas enzyme.

[0163] Any of the CRISPR/Cas system polynucleotide sequences of the exogenous composition may comprise either (a) RNA or (b) DNA wherein the polynucleotide sequences are operably linked to one or more regulatory elements capable of directing expression of CRISPR/Cas system RNA polynucleotide sequences.

[0164] Each of the CRISPR/Cas system polynucleotide sequences of the exogenous composition may consist of RNA and wherein the CRISPR/Cas system polynucleotide sequences may comprise a chimeric RNA polynucleotide molecule comprising the guide sequence, the tracr mate sequence and the tracr sequence.

[0165] Each of the CRISPR/Cas system polynucleotide sequences of the exogenous composition may be provided as DNA polynucleotide sequences further comprising at least one regulatory element operably linked to polynucleotide sequences encoding CRISPR/Cas system RNA polynucleotide sequences and capable of directing expression thereof, and wherein the CRISPR/Cas system RNA polynucleotide sequences may comprise a chimeric RNA polynucleotide (chiRNA) molecule comprising the guide sequence, the tracr mate sequence and the tracr sequence.

[0166] In the above-described methods, compositions, complexes, chiRNA or DNA polynucleotide molecules each of the guide sequence, the tracr mate sequences and the tracr sequence may be arranged in a 5′ to 3′ orientation; or each of the guide sequence, the tracr mate sequences and the tracr sequence may be arranged in a 3′ to 5′ orientation.

[0167] In the methods or compositions described herein (a) the CRISPR/Cas system polynucleotide sequences or polynucleotide sequences encoding the CRISPR/Cas system polynucleotide sequences and/or (b) polynucleotide sequences encoding the CRISPR/Cas enzyme may be comprised in one or more recombinant viral vectors. The polynucleotide sequences of (a) may be located on the same or different recombinant viral vector as polynucleotide sequences of (b).

[0168] The chiRNAs or the DNA polynucleotide molecules described herein may be comprised in a recombinant viral vector.

[0169] In the methods, compositions, complexes, chiRNAs or DNA polynucleotides described herein which utilize viral vectors, the viral vector may be a retroviral vector, optionally a lentiviral vector, a baculoviral vector, a herpes simplex virus vector, an adenoviral vector, an adenoassociated viral (AAV) vector such as AAV8 vector, or a poxvirus such as a vaccinia virus.

[0170] In the methods described herein (a) the CRISPR/Cas system polynucleotide sequences or polynucleotide sequences encoding the CRISPR/Cas system polynucleotide sequences and/or (b) polynucleotide sequences encoding the CRISPR/Cas enzyme may be delivered to the cell of the organism via liposomes, nanoparticles, exosomes, microvesicles or a gene-gun.

[0171] In the methods, compositions, complexes, chiRNAs or DNA polynucleotide molecules described herein the tracr sequence may be 30 or more nucleotides in length, 40 or more nucleotides in length, or 50 or more nucleotides in length.

[0172] In the methods, compositions, complexes, chiRNAs or DNA polynucleotide molecules described herein hybridization between the tracr sequence and the tracr mate sequence may produce a transcript having secondary structure, preferably a hairpin. The tracr sequence may comprise one or more regions capable of forming secondary structure, preferably a hairpin. The tracr sequence may comprise one or more hairpins, two or more hairpins, three or more hairpins, four or more hairpins, five or more hairpins, or at most five hairpins.

[0173] In some embodiments it may be preferred in a CRISPR complex that the tracr sequence has one or more hairpins and is 30 or more nucleotides in length, 40 or more nucleotides in length, or 50 or more nucleotides in length; the guide sequence is between 10 to 30 nucleotides in length, the CRISPR/Cas enzyme is a Type II Cas9 enzyme.

[0174] As described herein, preferred CRISPR/Cas enzymes are Type II CRISPR/Cas enzymes, preferably Type II Cas9 CRISPR/Cas enzymes or biologically active fragments or derivatives thereof.

[0175] In the methods, compositions, complexes, chiRNAs or DNA polynucleotide molecules described herein, the guide sequence may be 10 to 30 nucleotides in length.

[0176] In any of the methods, compositions, complexes, chiRNAs or DNA polynucleotide molecules described herein the CRISPR/Cas enzyme may be a Cas9 enzyme of Streptococcus pyogenes or a Cas9 enzyme of Streptococcus aureus, or a biologically active fragment or derivative thereof. Described herein are specific NLS sequences which may be applied to the CRISPR/Cas enzymes.

[0177] In any of the methods, compositions, complexes, chiRNAs or DNA polynucleotide molecules described herein the CRISPR/Cas enzyme may further comprise one or more nuclear localization sequences (NLSs) capable of driving the accumulation of the CRISPR/Cas enzyme to a detectible amount in the nucleus of the cell of the organism. The CRISPR/Cas enzyme may comprise two or more NLSs, three or more NLSs, four or more NLSs, five or more NLSs, six or more NLSs, seven or more NLSs, eight or more NLSs, nine or more NLSs, or ten or more NLSs. The CRISPR/Cas enzyme may comprise at least one NLS at or near the amino-terminus of the CRISPR/Cas enzyme and/or at least one NLS at or near the carboxy-terminus the CRISPR/Cas enzyme.

[0178] In any of the methods, compositions, complexes, chiRNAs or DNA polynucleotide molecules described herein when present as RNA within the cell the guide sequence may be capable of hybridizing to a sequence of a target viral nucleic acid which is an episomal nucleic acid molecule which is not integrated into the genome of the organism and wherein said manipulation is a manipulation of the episomal viral nucleic acid molecule, preferably wherein the episomal nucleic acid molecule is a double-stranded DNA polynucleotide molecule. The double-stranded DNA polynucleotide may be an episomal viral nucleic acid which is a covalently closed circular DNA (cccDNA). Where the target viral nucleic acid is a hepatitis B virus (HBV) nucleic acid, the double-stranded DNA polynucleotide may preferably be an episomal viral nucleic acid which is a cccDNA.

[0179] In any of the methods, compositions, complexes, chiRNAs or DNA polynucleotide molecules described herein the CRISPR/Cas complex may be capable of reducing the amount of episomal viral nucleic acid molecule in a cell of the organism compared to the amount of episomal viral nucleic acid molecule in a cell of the organism in the absence of providing the complex.

[0180] In any of the methods, compositions, complexes, chiRNAs or DNA polynucleotide molecules described herein the CRISPR/Cas complex may be capable of manipulating the episomal nucleic acid molecule to promote degradation of the episomal nucleic acid molecule.

[0181] In any of the methods, compositions, complexes, chiRNAs or DNA polynucleotide molecules described herein, when present as RNA within in the cell the guide sequence may be capable of hybridizing to a sequence of the target viral nucleic acid which is integrated into the genome of the organism and wherein said manipulation is a manipulation of the integrated target nucleic acid.

[0182] In any of the methods, compositions, complexes, chiRNAs or DNA polynucleotide molecules described herein, when formed within the cell the CRISPR/Cas complex may be capable of manipulating the integrated nucleic acid to promote excision of all or part of the target viral nucleic acid from the genome of the organism.

[0183] Any of the compositions, complexes, chiRNAs or DNA polynucleotide molecules described herein may be used in the manipulation of at least one target viral nucleic acid within the cell of a eukaryotic organism as described herein. Such a use may be in vitro and ex vivo.

[0184] In any of the methods, compositions, complexes, chiRNAs, DNA polynucleotide molecules or uses described herein at least one target viral nucleic acid may be comprised in a double-stranded DNA molecule polynucleotide cccDNA and/or viral DNA integrated into the genome of the organism, in which case the manipulation of the at least one target viral nucleic acid by the CRISPR-Cas complex comprises cleavage of viral cccDNA and/or integrated viral DNA. The cleavage may comprise one or more double-strand break(s) introduced into the viral cccDNA and/or integrated viral DNA, optionally at least two double-strand break(s). The cleavage may comprise one or more single-strand break(s) introduced into the viral cccDNA and/or integrated viral DNA, optionally at least two single-strand break(s).

[0185] In any of the methods, compositions, complexes, chiRNAs, DNA polynucleotide molecules or uses described herein, one or more double-strand break(s) and/or one or more single-strand break(s) may lead to the formation of one or more insertion and deletion mutations (INDELs) in the target viral cccDNA sequences and/or target integrated viral DNA sequences. The presence of INDELs may be assessed by SURVEYOR assay as described herein.

[0186] In any of the methods, compositions, complexes, chiRNAs, DNA polynucleotide molecules or uses described herein, cleavage of the viral cccDNA sequences or viral DNA sequences integrated in the genome of the organism may lead to excision of viral polynucleotide sequences from the cccDNA thereby reducing viral infection or excision of viral DNA sequences from the genome of the organism thereby reducing viral infection.

[0187] In methods or compositions or other embodiments of the invention which promote the formation of double-strand breaks the composition may comprise components of at least two types of CRISPR/Cas complex, wherein each type of complex comprises a guide sequence capable of hybridizing to different sequences of the target nucleic acid, wherein said cleavage is cleavage of first and second strands of the viral DNA via at least two double-strand breaks introduced into the viral cccDNA and/or into or adjacent viral DNA integrated into the genome of the organism;
[0188] wherein a first double-strand break is introduced at a first position of the DNA by manipulating a first target sequence and a second double-strand break is introduced at a second position of the DNA by manipulating a second target sequence;
[0189] wherein upon introduction of first and second double-strand breaks viral sequences between first and second double-strand breaks are excised from cccDNA and/or from the genomic DNA of the organism.

[0190] In methods or compositions or other embodiments of the invention which promote the formation of single-strand breaks, the composition may comprise components of at least four types of CRISPR/Cas complex, wherein each type of complex comprises a guide sequence capable of hybridizing to different sequences of the target nucleic acid, wherein said cleavage is via at least two pairs of single-strand breaks introduced into the viral cccDNA and/or introduced into or adjacent viral DNA integrated into the genome of the organism;
[0191] wherein to introduce a first pair of single-strand breaks a first single-strand break is introduced into a first strand of DNA by manipulating a first target sequence to create a first nick and a second single-strand break is introduced into the opposite strand of DNA by manipulating a second target sequence to create a second nick;
[0192] wherein to introduce a second pair of single-strand breaks a third single-strand break is introduced into said first strand of DNA by manipulating a third target sequence to create a third nick and a fourth single-strand break is introduced into said opposite strand of DNA by manipulating a fourth target sequence to create a fourth nick;
[0193] wherein upon introduction of first and second pairs of single-strand breaks viral sequences between first and second pairs of single-strand breaks are excised from cccDNA and/or from the genomic DNA of the organism.

[0194] The first and second nicks may be offset relative to each other by at least one base pair of the duplex creating a first overhang, and wherein third and fourth nicks are offset relative to each other by at least one base pair of the duplex creating a second overhang. Following excision of viral sequences the ends of the cleaved first strand of DNA may be ligated together and the ends of the cleaved second strand of DNA may be ligated together thus reforming unbroken first and second strands.

[0195] In methods or compositions or other embodiments of the invention which promote the formation of single-strand breaks the single-strand break(s) may be introduced into DNA by a nickase enzyme which is a modified Cas9 enzyme comprising a substitution leading to catalytic inactivation of the HNH nuclease domain or the RuvC nuclease domain of Cas9; optionally wherein the substitution is at position D10 of SpCas9, preferably a D10A substitution or substitution of a residue corresponding to position D10 in a SpCas9-related enzyme, or wherein the substitution is at position H840 of SpCas9, preferably a H840A substitution or substitution of a residue corresponding to position H840 in a SpCas9-related enzyme.

[0196] In any of the methods, compositions, complexes, chiRNAs, DNA polynucleotide molecules or uses described herein, target viral nucleic acid may be cccDNA and/or viral DNA integrated into the genome of the organism and wherein said manipulation comprises insertion of one or more nucleotides into or adjacent viral cccDNA sequences or into or adjacent integrated viral DNA sequences, deletion of one or more nucleotides of viral cccDNA or of integrated viral DNA, translocation of viral cccDNA sequences or of integrated viral DNA sequences, repression of transcription of viral cccDNA sequences or of integrated viral DNA sequences, and/or inactivation of viral cccDNA sequences or of integrated viral DNA sequences. Repression of transcription of viral cccDNA sequences and/or integrated viral DNA sequences may be effected by the action of a CRISPR-Cas system comprising a CRISPR enzyme fused to one or more transcriptional repressor domains, optionally wherein the one or more transcriptional repressor domains comprises KRAB, SID and/or SID4X, preferably wherein the CRISPR enzyme is a Cas9 enzyme. The manipulation may comprise activation of genes carried by viral cccDNA, e.g. by the action of a CRISPR-Cas system comprising a deactivated CRISPR enzyme fused to one or more transcriptional activation domains such as VP64, preferably the viral cccDNA is HBV and activation results in increased activity of APOBEC3A and/or APOBEC3B, and or other viral interferon-stimulated genes (ISGs), thereby leading to a reduction in HBV cccDNA. Manipulation of nucleotide sequences of viral cccDNA or integrated viral DNA may lead to disruption of one or more viral open reading frames, disruption of viral mRNA expression and/or inhibition of the production of functional virions.

[0197] In any of the methods, compositions, complexes, chiRNAs, DNA polynucleotide molecules or uses described herein, manipulation of said viral cccDNA may lead to a reduction in the level of one or more of viral reDNA, viral cccDNA and viral ssDNA compared to the level in the absence of the CRISPR/Cas complex.

[0198] In any of the methods, compositions, complexes, chiRNAs, DNA polynucleotide molecules or uses described herein, the effect of said manipulation may comprise inhibiting the production of new virions.

[0199] In any of the methods, compositions, complexes, chiRNAs, DNA polynucleotide molecules or uses described herein, the effect of said modifying may comprise removing viral sequences from said organism thereby reducing viral infection.

[0200] In any of the methods and compositions described herein, the described composition may further comprises components of one or more additional CRISPR/Cas complexes, or components required for the assembly of one or more additional CRISPR/Cas complexes, wherein each type of complex comprises a different guide sequence capable hybridizing to a different sequence of the target nucleic acid within the cell. Thus, any of the methods and compositions described herein may be additionally characterized by one or more additional CRISPR/Cas complexes each of which one or more additional CRISPR/Cas complexes may be characterized as described herein.

[0201] In any of the methods, compositions, complexes, chiRNAs, DNA polynucleotide molecules or uses described herein, the target viral nucleic acid may be a hepatitis B virus (HBV) nucleic acid. Where the target viral nucleic acid is a hepatitis B virus (HBV) nucleic acid, the cell of the organism is a cell capable of being infected by HBV. The cell may be a cell which expresses the sodium taurocholate cotransporting polypeptide (NTCP). The cell may be a hepatocyte, preferably a primary hepatocyte, more preferably a human hepatocyte or a human primary hepatocyte, a HepG2.2.15 or a HepG2-hNTCP cell.

[0202] When the target viral nucleic acid is a hepatitis B virus (HBV) nucleic acid the guide sequence may be capable of hybridizing with target viral nucleic acids of HBV ORF S, ORF C, ORF P, or ORF X, preferably ORF C, optionally wherein the sequence of the guide sequence comprises 5′-gggcgcacctctctttacg-3′ (SEQ ID NO: 1750), 5′-cctctgccgatccatactg-3′ (SEQ ID NO: 1472) or 5′-taaagaatttggagctactg-3′ (SEQ ID NO: 1566).

[0203] In the methods, compositions, complexes, chiRNAs, DNA polynucleotide molecules or uses described herein, the target viral nucleic acid may be a human papillomavirus (HPV) nucleic acid, an Epstein Barr virus (EBV) nucleic acid, a herpes simplex virus (HSV) nucleic acid, or a varicella zoster virus (VZV) nucleic acid.

[0204] In any of the methods, compositions, complexes, chiRNAs, DNA polynucleotide molecules or uses described herein, said manipulation may be performed in vitro or ex vivo.

[0205] Any of the compositions, complexes, chiRNAs or DNA polynucleotide molecules described herein may be described for use as a medicament.

[0206] Any of the compositions, complexes, chiRNAs or DNA polynucleotide molecules described herein may be described for use in the treatment of a viral infection. Such a treatment may be of a viral infection wherein target viral sequences are comprised in an episomal nucleic acid molecule which is not integrated into the genome of the organism, such as a covalently closed circular DNA (cccDNA). The viral infection may caused by hepatitis B virus (HBV), human papillomavirus (HPV), Epstein Barr virus (EBV), herpes simplex virus (HSV) or varicella zoster virus (VZV).

[0207] Any of the compositions, complexes, chiRNAs or DNA polynucleotide molecules described herein may be described for use as a medicament or for use in the treatment of a viral infection wherein the organism is a mammal such as a human.

[0208] Any of the compositions, complexes, chiRNAs or DNA polynucleotide molecules described herein may be described for use in the manufacture of a medicament.

[0209] Any of the compositions, complexes, chiRNAs or DNA polynucleotide molecules described herein may be described for use in the manufacture of a medicament for the treatment of a viral infection. Such a treatment may be of a viral infection wherein target viral sequences are comprised in an episomal nucleic acid molecule which is not integrated into the genome of the organism, such as a covalently closed circular DNA (cccDNA). The viral infection may be caused by hepatitis B virus (HBV) or the viral infection may be caused by human papillomavirus (HPV), Epstein Barr virus (EBV), herpes simplex virus (HSV), or varicella zoster virus (VZV). In any such uses the organism may be a mammal such as a human.

[0210] The invention also relates to a method of modifying a cell, of a eukaryotic organism by manipulating at least one target viral nucleic acid within the cell, the method comprising introducing into the cell an exogenous composition capable of forming a Clustered Regularly Interspersed Short Palindromic Repeats (CRISPR)-CRISPR-associated (Cas) (CRISPR-Cas) complex, the composition comprising:
[0211] (A) CRISPR-Cas system polynucleotide sequences comprising:
   [0212] (i) a guide sequence, which when transcribed is capable of hybridizing to a sequence of the at least one target viral nucleic acid to be manipulated;
   [0213] (ii) a trans-activating CRISPR RNA (tracr) mate sequence, which is linked to the guide sequence; and
   [0214] (iii) a tracr sequence, wherein when transcribed all or a portion of the tracr sequence is capable of hybridizing to the tracr mate sequence; and
[0215] (B) a CRISPR/Cas enzyme or a polynucleotide encoding a CRISPR/Cas enzyme, wherein when the CRISPR/Cas system polynucleotide sequences are present as RNA within the cell and the CRISPR/Cas enzyme is present as a protein within the cell:
   [0216] (i) the tracr mate sequence is hybridized to the tracr sequence or portion thereof;
   [0217] (ii) the CRISPR/Cas system polynucleotide sequences are associated with the CRISPR/Cas enzyme, so forming a CRISPR/Cas complex; and
   [0218] (iii) the guide sequence hybridizes to a sequence of the at least one target viral nucleic acid thereby directing sequence-specific binding of the CRISPR/Cas complex to the at least one sequence of the target viral nucleic acid, whereupon said sequence of said target viral nucleic acid is manipulated by the CRISPR/Cas enzyme of the complex.

[0219] In relation to such a method the cell may be a cell which expresses the sodium taurocholate cotransporting polypeptide (NTCP), preferably the cell may be a hepatocyte; the tracr sequence has one or more hairpins and is 30 or more nucleotides in length, 40 or more nucleotides in length, or 50 or more nucleotides in length; the guide sequence is between 10 to 30 nucleotides in length, the CRISPR/Cas enzyme is a Type II Cas9 enzyme; the target viral nucleic acid is comprised in an HBV episomal nucleic acid which is not integrated into the genome of the organism and is an HBV double-stranded covalently closed circular DNA (cccDNA). Such a method may be additionally characterized, as appropriate, in accordance with any of the further and particular features as described herein.

[0220] The invention also relates to an exogenous composition which, when introduced into a cell of a eukaryotic organism, is capable of forming at least one Clustered Regularly Interspersed Short Palindromic Repeats (CRISPR)-CRISPR-associated (Cas) (CRISPR-Cas) complex, wherein the complex is capable of modifying the cell by manipulating at least one target viral nucleic acid within the cell, the composition comprising:
[0221] (A) Clustered Regularly Interspersed Short Palindromic Repeats (CRISPR)-CRISPR associated (Cas) (CRISPR-Cas) system polynucleotide sequences comprising:
   [0222] (i) a guide sequence, which when transcribed is capable of hybridizing to a sequence of the at least one target viral nucleic acid to be manipulated;
   [0223] (ii) a trans-activating CRISPR RNA (tracr) mate sequence, which is linked to the guide sequence; and
   [0224] (iii) a tracr sequence, wherein when transcribed all or a portion of the tracr sequence is capable of hybridizing with the tracr mate sequence; and
[0225] (B) a CRISPR/Cas enzyme or a polynucleotide encoding a CRISPR/Cas enzyme, wherein when the CRISPR/Cas system polynucleotide sequences are present as RNA within the cell and the CRISPR/Cas enzyme is present as a protein within the cell:
   [0226] (i) the tracr mate sequence is hybridized to the tracr sequence or portion thereof;
   [0227] (ii) the CRISPR/Cas system polynucleotide sequences are associated with the CRISPR/Cas enzyme, so forming a CRISPR/Cas complex; and
   [0228] (iii) the guide sequence hybridizes to a sequence of the at least one target viral nucleic acid thereby directing sequence-specific binding of the CRISPR/Cas complex to the at least one sequence of the target viral nucleic acid, whereupon said sequence of said target viral nucleic acid is manipulated by the CRISPR/Cas enzyme of the complex.

[0229] In relation to such a composition the cell may be a cell which expresses the sodium taurocholate cotransporting polypeptide (NTCP), preferably the cell may be a hepatocyte; the tracr sequence has one or more hairpins and is 30 or more nucleotides in length, 40 or more nucleotides in length, or 50 or more nucleotides in length; the guide sequence is between 10 to 30 nucleotides in length, the CRISPR/Cas enzyme is a Type II Cas9 enzyme; the target viral nucleic acid is comprised in an HBV episomal nucleic acid which is not integrated into the genome of the organism and is an HBV double-stranded covalently closed circular DNA (cccDNA). Such a composition may be additionally characterized, as appropriate, in accordance with any of the further and particular features as described herein.

[0230] The invention also relates to a Clustered Regularly Interspersed Short Palindromic Repeats (CRISPR)-CRISPR-associated (Cas) (CRISPR-Cas) complex which, when introduced into a cell of a eukaryotic organism, is capable of modifying the cell by manipulating a target viral nucleic acid within the cell, the complex comprising:
[0231] (A) CRISPR-Cas system RNA polynucleotide sequences comprising:
   [0232] (i) a guide sequence, which is capable of hybridizing to a sequence of the target viral nucleic acid to be manipulated;
   [0233] (ii) a trans-activating CRISPR RNA (tracr) mate sequence, which is linked to the guide sequence; and
   [0234] (iii) a tracr sequence, wherein all or a portion of the tracr sequence is capable of hybridizing with the tracr mate sequence; and
[0235] (B)) a CRISPR/Cas enzyme,
   wherein when the CRISPR/Cas system RNA polynucleotide sequences and the CRISPR/Cas enzyme are present within the cell:
[0236] (i) the tracr mate sequence is hybridized to the tracr sequence or portion thereof;
[0237] (ii) the CRISPR/Cas system polynucleotide sequences are associated with the CRISPR/Cas enzyme, so forming a CRISPR/Cas complex; and
[0238] (iii) the guide sequence hybridizes to a sequence of the target viral nucleic acid thereby directing sequence-specific binding of the CRISPR/Cas complex to the sequence of the target viral nucleic acid, whereupon said sequence of said target viral nucleic acid is manipulated by the CRISPR/Cas enzyme of the complex.

[0239] In relation to such a complex the cell may be a cell which expresses the sodium taurocholate cotransporting polypeptide (NTCP), preferably the cell may be a hepatocyte; the tracr sequence has one or more hairpins and is 30 or more nucleotides in length, 40 or more nucleotides in length, or 50 or more nucleotides in length; the guide sequence is between 10 to 30 nucleotides in length, the CRISPR/Cas enzyme is a Type II Cas9 enzyme; the target viral nucleic acid is comprised in an HBV episomal nucleic acid which is not integrated into the genome of the organism and is an HBV double-stranded covalently closed circular DNA (cccDNA). Such a complex may be additionally characterized, as appropriate, in accordance with any of the further and particular features as described herein.

[0240] The invention also relates to a Clustered Regularly Interspersed Short Palindromic Repeats (CRISPR)-CRISPR-associated (Cas) (CRISPR-Cas) system chimeric RNA polynucleotide molecule (chiRNA) which, when introduced into a cell of a eukaryotic organism, is capable of associating with a CRISPR/Cas enzyme so forming a CRISPR-Cas complex, wherein the CRISPR-Cas complex is capable of modifying the cell by manipulating a target viral nucleic acid within the cell; the chiRNA comprising:
[0241] (i) a guide sequence, which is capable of hybridizing to a sequence of the target viral nucleic acid to be manipulated;
[0242] (ii) a trans-activating CRISPR RNA (tracr) mate sequence, which is linked to the guide sequence; and
[0243] (iii) a tracr sequence, wherein all or a portion of the tracr sequence is capable of hybridizing with the tracr mate sequence; and
   wherein when the chiRNA and the CRISPR/Cas enzyme are present within the cell:
[0244] a) the tracr mate sequence hybridizes to the tracr sequence or portion thereof;
[0245] b) the chiRNA associates with the CRISPR/Cas enzyme, so forming the CRISPR/Cas complex; and
[0246] c) the guide sequence hybridizes to a sequence of the target viral nucleic acid thereby directing sequence-specific binding of the CRISPR/Cas complex to the sequence of the target viral nucleic acid whereupon said sequence of said target viral nucleic acid is manipulated by the CRISPR/Cas enzyme of the complex.

[0247] In relation to such a chiRNA, the cell may be a cell which expresses the sodium taurocholate cotransporting polypeptide (NTCP), preferably the cell may be a hepatocyte; the tracr sequence has one or more hairpins and is 30 or more nucleotides in length, 40 or more nucleotides in length, or 50 or more nucleotides in length; the guide sequence is between 10 to 30 nucleotides in length, the CRISPR/Cas enzyme is a Type II Cas9 enzyme; the target viral nucleic acid is comprised in an HBV episomal nucleic acid which is not integrated into the genome of the organism and is an HBV double-stranded covalently closed circular DNA (cccDNA). Such a chiRNA may be additionally characterized, as appropriate, in accordance with any of the further and particular features as described herein.

[0248] The invention also relates to a DNA polynucleotide molecule comprising sequences encoding a Clustered Regularly Interspersed Short Palindromic Repeats (CRISPR)-CRISPR-associated (Cas) (CRISPR-Cas) system chimeric RNA polynucleotide molecule (chiRNA), wherein upon introduction of said chiRNA into a cell of a eukaryotic organism said chiRNA is capable of associating with a CRISPR/Cas enzyme so forming a CRISPR-Cas complex, wherein the CRISPR-Cas complex is capable of modifying the cell by manipulating a target viral nucleic acid within the cell; the chiRNA comprising:
[0249] (i) a guide sequence, which is capable of hybridizing to a sequence of the target viral nucleic acid to be manipulated;
[0250] (ii) a trans-activating CRISPR RNA (tracr) mate sequence, which is linked to the guide sequence; and
[0251] (iii) a tracr sequence, wherein all or a portion of the tracr sequence is capable of hybridizing with the tracr mate sequence; and
   wherein when the chiRNA and the CRISPR/Cas enzyme are present within the cell:
[0252] a) the tracr mate sequence hybridizes to the tracr sequence or portion thereof;
[0253] b) the chiRNA associates with the CRISPR/Cas enzyme, so forming the CRISPR/Cas complex; and
[0254] c) the guide sequence hybridizes to a sequence of the target viral nucleic acid thereby directing sequence-specific binding of the CRISPR/Cas complex to the sequence of the target viral nucleic acid whereupon said sequence of said target viral nucleic acid is manipulated by the CRISPR/Cas enzyme of the complex.

[0255] In relation to such a DNA, the cell may be a cell which expresses the sodium taurocholate cotransporting polypeptide (NTCP), preferably the cell may be a hepatocyte; the tracr sequence has one or more hairpins and is 30 or more nucleotides in length, 40 or more nucleotides in length, or 50 or more nucleotides in length; the guide sequence is between 10 to 30 nucleotides in length, the CRISPR/Cas enzyme is a Type II Cas9 enzyme; the target viral nucleic acid is comprised in an HBV episomal nucleic acid which is not integrated into the genome of the organism and is an HBV double-stranded covalently closed circular DNA (cccDNA). Such a DNA may be additionally characterized, as appropriate, in accordance with any of the further and particular features as described herein.

[0256] Certain methods, products and uses described herein may not be applied in situations which result in the destruction of a human embryo and in situations which result in the modification of the germ line genetic identity of humans. Methods, products and uses described herein may be used for non-therapeutic purposes. Furthermore, any of the methods described herein may be applied in vitro and ex vivo.

[0257] It will be appreciated that the invention described herein involves various components which may display variations in their specific characteristics. It will be appreciated that any combination of features described above and herein, as appropriate, are contemplated as a means for implementing the invention.

[0258] Furthermore, it is an object of the invention to not encompass within the invention any previously known product, process of making the product, or method of using the product such that Applicants reserve the right and hereby disclose a disclaimer of any previously known product, process, or method. It is further noted that the invention does not intend to encompass within the scope of the invention any product, process, or making of the product or method of using the product, which does not meet the written description and enablement requirements of the USPTO (35 U.S.C. § 112, first paragraph) or the EPO (Article 83 of the EPC), such that Applicants reserve the right and hereby disclose a disclaimer of any such cubject matter.

[0259] It is noted that in this disclosure and particularly in the claims and/or paragraphs, terms such as “comprises”, “comprised”, “comprising” and the like can have the meaning attributed to it in U.S. Patent law; e.g., they can mean “includes”, “included”, “including”, and the like; and that terms such as “consisting essentially of” and “consists essentially of” have the meaning ascribed to them in U.S. Patent law, e.g., they allow for elements not explicitly recited, but exclude elements that are found in the prior art or that affect a basic or novel characteristic of the invention. It may be advantageous in the practice of the invention to be in compliance with Art. 53 (c) EPC and Rule 28 (b) and (c) EPC. Nothing herein is intended as a promise.

[0260] These and other embodiments are disclosed or are obvious from and encompassed by, the following Detailed Description.

### BRIEF DESCRIPTION OF THE DRAWINGS

[0261] The novel features of the invention are set forth with particularity in the appended claims. A better understanding of the features and advantages of the present invention will be obtained by reference to the following detailed description that sets forth illustrative embodiments, in which the principles of the invention are utilized, and the accompanying drawings of which:

[0262] FIG. 1 shows a schematic model of the CRISPR system. The Cas9 nuclease from Streptococcus pyogenes (yellow) is targeted to genomic DNA by a synthetic guide RNA (sgRNA) consisting of a 20-nt guide sequence (blue) and a scaffold (red). The guide sequence base-pairs with the DNA target (blue), directly upstream of a requisite 5′-NGG protospacer adjacent motif (PAM; magenta), and Cas9 mediates a double-stranded break (DSB) ˜3 bp upstream of the PAM (red triangle).

[0263] FIG. 2A-F shows an exemplary CRISPR system, a possible mechanism of action, an example adaptation for expression in eukaryotic cells, and results of tests assessing nuclear localization and CRISPR activity. FIG. 2C discloses SEQ ID NOS 1581 and 1582, respectively, in order of appearance. FIG. 2E discloses SEQ ID NOS 1583-1585, respectively, in order of appearance. FIG. 2F discloses SEQ ID NOS 1586-1590, respectively, in order of appearance.

[0264] FIG. 3A-D shows results of an evaluation of SpCas9 specificity for an example target. FIG. 3A discloses SEQ ID NOS 1591, 1584 and 1592-1602, respectively, in order of appearance. FIG. 3C discloses SEQ ID NO: 1591.

[0265] FIG. 4A-G show an exemplary vector system and results for its use in directing homologous recombination in eukaryotic cells. FIG. 4E discloses SEQ ID NO: 1603. FIG. 4F discloses SEQ ID NOS 1604 and 1605, respectively, in order of appearance. FIG. 4G discloses SEQ ID NOS 1606-1610, respectively, in order of appearance.

[0266] FIG. 5 provides a table of protospacer sequences (SEQ ID NOS 1611-1626, respectively, in order of appearance) and summarizes modification efficiency results for protospacer targets designed based on exemplary S. pyogenes and S. thermophilus CRISPR systems with corresponding PAMs against loci in human and mouse genomes. Cells were transfected with Cas9 and either pre-crRNA/tracrRNA or chimeric RNA, and analyzed 72 hours after transfection. Percent indels are calculated based on Surveyor assay results from indicated cell lines (N=3 for all protospacer targets, errors are S.E.M., N.D. indicates not detectable using the Surveyor assay, and N.T. indicates not tested in this study).

[0267] FIG. 6A-C shows a comparison of different tracrRNA transcripts for Cas9-mediated gene targeting. FIG. 6A discloses SEQ ID NOS 1627 and 1628, respectively, in order of appearance.

[0268] FIG. 7 shows a schematic of a surveyor nuclease assay for detection of double strand break-induced micro-insertions and -deletions.

[0269] FIG. 8A-B shows exemplary bicistronic expression vectors for expression of CRISPR system elements in eukaryotic cells. FIG. 8A discloses SEQ ID NOS 1629-1631, respectively, in order of appearance. FIG. 8B discloses SEQ ID NOS 1632, 1541 and 1542, respectively, in order of appearance.

[0270] FIG. 9A-C shows histograms of distances between adjacent S. pyogenes SF370 locus 1 PAM (NGG) (FIG. 9A) and S. thermophilus LMD9 locus 2 PAM (NNAGAAW) (FIG. 9B) in the human genome; and distances for each PAM by chromosome (Chr) (FIG. 9C).

[0271] FIG. 10A-D shows an exemplary CRISPR system, an example adaptation for expression in eukaryotic cells, and results of tests assessing CRISPR activity. FIG. 10B discloses SEQ ID NOS 1633 and 1634, respectively, in order of appearance. FIG. 10C discloses SEQ ID NO: 1635.

[0272] FIG. 11A-C shows exemplary manipulations of a CRISPR system for targeting of genomic loci in mammalian cells. FIG. 11A discloses SEQ ID NO: 1636. FIG. 11B discloses SEQ ID NOS 1637-1639, respectively, in order of appearance. FIG. 11C depicts results of a Surveyor assay comparing the efficacy of Cas9-mediated cleavage at five protospacers in the human EMX1 locus.

[0273] FIG. 12A-B shows the results of a Northern blot analysis of crRNA processing in mammalian cells. FIG. 12A discloses SEQ ID NO: 1640.

[0274] FIG. 13A-B shows an exemplary selection of protospacers in the human PVALB (SEQ ID NO: 1641) and mouse Th loci (SEQ ID NO: 1642).

[0275] FIG. 14 shows example protospacer and corresponding PAM sequence targets of the S. thermophilus CRISPR system in the human EMX1 locus. FIG. 14 discloses SEQ ID NO: 1635.

[0276] FIG. 15 provides a table of sequences (SEQ ID NOS 1643-1650, 1550-1551 and 1651-1652, respectively, in order of appearance) for primers and probes used for Surveyor, RFLP, genomic sequencing, and Northern blot assays.

[0277] FIG. 16A-C shows exemplary manipulation of a CRISPR system with chimeric RNAs and results of SURVEYOR assays for system activity in eukaryotic cells. FIG. 16A discloses SEQ ID NO: 1653.

[0278] FIG. 17A-B shows a graphical representation of the results of SURVEYOR assays for CRISPR system activity in eukaryotic cells.

[0279] FIG. 18 shows an exemplary visualization of some S. pyogenes Cas9 target sites in the human genome using the UCSC genome browser. FIG. 18 discloses SEQ ID NOS 1654-1732, respectively, in order of appearance.

[0280] FIG. 19A-D shows a circular depiction of the phylogenetic analysis revealing five families of Cas9s, including three groups of large Cas9s (˜1400 amino acids) and two of small Cas9s (˜1100 amino acids).

[0281] FIG. 20A-F shows the linear depiction of the phylogenetic analysis revealing five families of Cas9s, including three groups of large Cas9s (˜1400 amino acids) and two of small Cas9s (˜1100 amino acids).

[0282] FIG. 21A-D shows genome editing via homologous recombination. (a) Schematic of SpCas9 nickase, with D10A mutation in the RuvC I catalytic domain. (b) Schematic representing homologous recombination (HR) at the human EMX1 locus using either sense or antisense single stranded oligonucleotides as repair templates. Red arrow above indicates sgRNA cleavage site; PCR primers for genotyping (Tables J and K) are indicated as arrows in right panel. (c) Sequence of region modified by HR. d, SURVEYOR assay for wildtype (wt) and nickase (D10A) SpCas9-mediated indels at the EMX1 target 1 locus (n=3). Arrows indicate positions of expected fragment sizes. FIG. 21C discloses SEQ ID NOS 1733-1735, 1733, 1736 and 1735, respectively, in order of appearance.

[0283] FIG. 22A-B shows single vector designs for SpCas9. FIG. 22A discloses SEQ ID NOS 1737-1739, respectively, in order of appearance. FIG. 22B discloses SEQ ID NO: 1740.

[0284] FIG. 23 shows a graph representing the length distribution of Cas9 orthologs.

[0285] FIG. 24A-M shows sequences where the mutation points are located within the SpCas9 gene. FIG. 24A-M discloses the nucleotide sequence as SEQ ID NO: 1741 and the amino acid sequence as SEQ ID NO: 1742.

[0286] FIG. 25A shows the Conditional Cas9, Rosa26 targeting vector map.

[0287] FIG. 25B shows the Constitutive Cas9, Rosa26 targeting vector map.

[0288] FIG. 26 shows a schematic of the important elements in the Constitutive and Conditional Cas9 constructs.

[0289] FIG. 27 shows delivery and in vivo mouse brain Cas9 expression data.

[0290] FIG. 28A-C shows RNA delivery of Cas9 and chimeric RNA into cells (A) Delivery of a GFP reporter as either DNA or mRNA into Neuro-2A cells. (B) Delivery of Cas9 and chimeric RNA against the Icam2 gene as RNA results in cutting for one of two spacers tested. (C) Delivery of Cas9 and chimeric RNA against the F7 gene as RNA results in cutting for one of two spacers tested.

[0291] FIG. 29 shows how DNA double-strand break (DSB) repair promotes gene editing. In the error-prone non-homologous end joining (NHEJ) pathway, the ends of a DSB are processed by endogenous DNA repair machineries and rejoined together, which can result in random insertion/deletion (indel) mutations at the site of junction. Indel mutations occurring within the coding region of a gene can result in frame-shift and a premature stop codon, leading to gene knockout. Alternatively, a repair template in the form of a plasmid or single-stranded oligodeoxynucleotides (ssODN) can be supplied to leverage the homology-directed repair (HDR) pathway, which allows high fidelity and precise editing.

[0292] FIG. 30A-C shows anticipated results for HDR in HEK and HUES9 cells. (a) Either a targeting plasmid or an ssODN (sense or antisense) with homology arms can be used to edit the sequence at a target genomic locus cleaved by Cas9 (red triangle). To assay the efficiency of HDR, Applicants introduced a HindIII site (red bar) into the target locus, which was PCR-amplified with primers that anneal outside of the region of homology. Digestion of the PCR product with HindIII reveals the occurrence of HDR events. (b) ssODNs, oriented in either the sense or the antisense (s or a) direction relative to the locus of interest, can be used in combination with Cas9 to achieve efficient HDR-mediated editing at the target locus. A minimal homology region of 40 bp, and preferably 90 bp, is recommended on either side of the modification (red bar). (c) Example of the effect of ssODNs on HDR in the EMX1 locus is shown using both wild-type Cas9 and Cas9 nickase (D10A). Each ssODN contains homology arms of 90 bp flanking a 12-bp insertion of two restriction sites. FIG. 30B discloses SEQ ID NOS 1733-1735, 1733, 1736 and 1735, respectively, in order of appearance.

[0293] FIG. 31A-C shows the repair strategy for Cystic Fibrosis delta F508 mutation. FIG. 31A discloses the nucleotide sequence as SEQ ID NO: 1743 and the amino acid sequence as 1744. FIG. 31B discloses SEQ ID NO: 1653. FIG. 31C discloses the nucleotide sequence as SEQ ID NO: 1745 and the amino acid sequence as SEQ ID NO: 1746.

[0294] FIG. 32A-B (a) shows a schematic of the GAA repeat expansion in FXN intron 1 and (b) shows a schematic of the strategy adopted to excise the GAA expansion region using the CRISPR/Cas system.

[0295] FIG. 33 shows a screen for efficient SpCas9 mediated targeting of Tet1-3 and Dnmt1, 3a and 3b gene loci. Surveyor assay on DNA from transfected N2A cells demonstrates efficient DNA cleavage by using different gRNAs.

[0296] FIG. 34 shows a strategy of multiplex genome targeting using a 2-vector system in an AAV1/2 delivery system. Tet1-3 and Dnmt1, 3a and 3b gRNA under the control of the U6 promoter. GFP-KASH under the control of the human synapsin promoter. Restriction sides shows simple gRNA replacement strategy by subcloning. HA-tagged SpCas9 flanked by two nuclear localization signals (NLS) is shown. Both vectors are delivered into the brain by AAV1/2 virus in a 1:1 ratio.

[0297] FIG. 35 shows verification of multiplex DNMT targeting vector #1 functionality using Surveyor assay. N2A cells were co-transfected with the DNMT targeting vector #1 (+) and the SpCas9 encoding vector for testing SpCas9 mediated cleavage of DNMTs genes family loci. gRNA only (−) is negative control. Cells were harvested for DNA purification and downstream processing 48 h after transfection.

[0298] FIG. 36 shows guide RNA design for HBV targeting CRISPR constructs. Cleavage sites were optimized for low homology to human genomic DNA and conservation (guides 13-24)

[0299] FIG. 37 shows a scheme for quantifying cccDNA in response to Cas9 treatment, 1st round of experiments.

[0300] FIG. 38 shows qPCR results from 1st round of HepG2.2.15 experiments.

[0301] FIG. 39 shows a Surveyor assay for nuclease activity. Indels form as the result of imperfect NHEJ events due to repeated DSB formation from nuclease activity. For Cas9 targeted genomic loci indel formation at rates 10-30% are often observed and can approach 50%.

[0302] FIG. 40 shows representative surveyor for 1st set of HepG2.2.15 experiments.

[0303] FIG. 41 shows HepG2.2.15 HBV quantification scheme, an experimental design motivated by noise of initial data sets.

[0304] FIG. 42 shows HepG2.2.15 results using sorting based normalization.

[0305] FIG. 43 shows low levels of indels observed with guides targeting conserved HBV sequences in 2nd round of HepG2.2.15 experiments.

[0306] FIG. 44 shows HepG2 co-transfection experiments.

[0307] FIG. 45 shows HDD data for Cohort 1.

[0308] FIG. 46 shows HDD data for Cohort 2.

[0309] FIG. 47 shows HDD data for Cohort 2.

[0310] FIG. 48 shows HDD data for Cohort 2.

[0311] FIG. 49 shows Cohort 2-liver analysis 9d post HDD.

[0312] FIG. 50 shows Cohort 2-liver analysis 9d post HDD.

[0313] FIG. 51 shows low/no indels formed during HDD experiments. Predicted band sizes for guide 21 formation: 235+272+507 bp (undigested PCR product).

[0314] FIG. 52 shows HDD Cohort 3 Results: HBsAg.

[0315] FIG. 53 shows HDD Cohort 3 Results: Viremia.

[0316] FIG. 54 shows HDD Cohort 3 Results: HBV in Liver

[0317] FIG. 55 shows HDD Cohort 3 Results: Luciferase normalized to GAPDH.

[0318] FIG. 56 shows despite low/no indel formation, effects on HBV are dependent on Cas9 nuclease activity.

[0319] FIG. 57A-B shows (a) schematic of HBV life cycle and putative anti-HBV effect of CRISPR constructs; Cas9-mediated DSB formation should linearize the small, episomal cccDNA repeatedly, potentially leading to indel formation (generating less-fit viral mutants) or even degradation. (b) (left) HBV genome organization and location of target sequences for several tested guide RNA constructs, (right) Table of all possible CRISPR target sites in each HBV ORF, including number of possible target sites in conserved genomic regions.

[0320] FIG. 58A-D shows (a) guide RNAs targeting conserved regions target large majority of patient-derived virus genomes. All whole-genome sequences from HBV isolates were queried from GenBank to determine the conservation of 23 nt target sequence (20 nt spacer+3 nt PAM) for 3 guides (6, 17, and 21). x-axis denotes number of allowed mismatches, and y-axis denotes the percentage of sequenced isolates that fall within this number of mismatches to native sgRNA target site; (b) schematic for HepG2 transfection experiments and (c-d): HepG2 cells co-transfected with 1.3×WT HBV and sgRNA/Cas9-2A-mCherry construct showing effect on HBsAg (c) and HBV 3.5 kb RNA (d).

[0321] FIG. 59A-C shows (a) Experimental schematic for hydrodynamic injection experiments of (b-c): 1.3×WT HBV and sgRNA/Cas9-2A-mCherry are delivered to the livers of immunodeficient NRG mice via hydrodynamic injection, and (b) HBsAg and (c) secreted HBV titer are quantified in mouse blood at 2 and 4 days post injection. 21M: guide RNA with 5 bp mismatch from g21. Data shown are from one representative experiment, and consistent across multiple experiments. UT: ‘untargeted’ guide RNA (no target sequence in HBV genome). *p<0.05 for selected comparison; **p<0.01 for selected comparison; ***p<0.001 for selected comparison as assessed by two-tailed t-test.

[0322] FIG. 60A-B shows (a) the HBV life cycle within HepG2.2.15 cells. HepG2.2.15 cells contain genomically integrated linear 1.3×WT HBV sequences, from which viral proteins and cccDNA are constitutively produced via transcription followed by translation (proteins) or reverse transcription and nuclear re-import (cccDNA). The persistent HBV production in this system enables assay of the long-term anti-HBV effects of CRISPR/Cas systems targeting viral DNA; and (b) schematic of lentiviral vector and experimental strategy for sustained CRISPR expression within HepG2.2.15 cells.

[0323] FIG. 61A-B shows that HBV-targeting CRISPR reduces HBV DNA and cccDNA dependent upon HBV-specific guide RNA and Cas9 activity.

[0324] FIG. 62A-C shows HBV products are reduced upon long-term CRISPR/Cas expression. Stable lines of HepG2.2.15 cells expressing 3 different on-target guides with nuclease-active or nuclease-dead Cas9, along with 3 non-HBV targeting guides, were seeded at consistent cell densities (20,000 cells/cm²) and allowed to secrete virions and viral proteins into the supernatant. 72h later, supernatant was collected and (a) viral titer and (b) HBeAg (a secreted protein produced from the C ORF, used clinically as a marker of active viral replication) were quantified (c). Total HBV RNA and 3.5 kb RNA (consisting of pregenomic RNA and the longest translated HBV RNA species, which are difficult to distinguish) were quantified at 36 days post transduction, with HBV RNA suppression continuing out to this late time point. (a-b) *p<0.05 vs. UT; **p<0.01 vs. UT; ***p<0.001 vs. UT as assessed by one-way ANOVA followed by Dunnett's post-hoc test.

[0325] FIG. 63A-B shows that CRISPR constructs targeting HBV cause large and progressive reduction in (a) cccDNA and (b) total HBV DNA levels that is dependent on successful targeting of viral DNA.

[0326] FIG. 64A-B shows HBV DNA and cccDNA reductions upon long-term CRISPR/Cas expression are produced with multiple guides. (a) cccDNA reductions at 21 and 36 days post transduction across 3 guides (6, 17, and 21); large reductions are seen in each. (b) Total HBV DNA reductions at 21 and 36 days post transduction are also large across these 3 guide RNAs.

[0327] FIG. 65 shows Southern blot of HBV DNA.

[0328] FIG. 66 shows Southern blot of HBV DNA.

[0329] FIG. 67 shows Surveyor assay to detect indel formation in total HBV DNA (top) and episomal HBV DNA, enriched by treatment with plasmid-safe DNase (bottom); lentiviral transduction enables high levels of cutting of HBV. Arrowheads depict surveyor digestion products resulting from indel formation. Expected PCR product sizes for g6, g17 and g21 are respectively 599, 946 and 507 bp. Approximate sizes of surveyor digestion products for g6, g17 and g21 are respectively: 429+170, 570+376, 275+232.

[0330] FIG. 68 shows Immunofluorescent imaging of HBV Core protein demonstrates large reduction in Core staining upon targeting by g17 specifically against the Core ORF.

[0331] FIG. 69 shows schematics for de novo infection experiments. Hep-NTCP cells were transduced with Cas9/gRNA constructs containing either g17 or g17M (mutant of g17, resulting in 5 bp DNA bulge upon complexation to HBV DNA target), and either WT or dead Cas9, and then selected with puromycin to generate stable lines. (Left) These cells were seeded in coculture with HepG2.2.15 cells, which produce infectious HBV virions that then infect the transduced Hep-NTCP cells. After transient coculture, HepG2.2.15 cells were killed by puromycin selection, and Hep-NTCP cells were cultured for several days and then harvested to assay viral parameters. (Right) These cells were infected with HBV virions derived from HBV+ patient plasma, then cultured and harvested to assay viral parameters.

[0332] FIG. 70A-D shows HBsAg secretion (a), cccDNA copies (b), levels of HBV 3.5 kb RNA relative to 5 bp mismatch control (c), and titer of HBV DNA in culture medium (d). The data show that Cas9/g17 reduce HBV infection in de novo infection context. 17M: 5 bp mismatch control. 17D: dead Cas9 with g17. Data shown are from one representative experiment, and consistent across experiments.

[0333] FIG. 71A-C shows CRISPR/Cas-mediated disruption of HBV in patient-derived virus model system. Hep-NTCP cells were infected with HBV from infected patient serum upon transduction of guide 17 and active or nuclease-dead Cas9. 9 days after infection, the cells were harvested and viral products were quantified. Nuclease-active Cas9 caused decreases in HBV 3.5 kb RNA (a), cccDNA (b), and total DNA levels (c).

[0334] FIG. 72 shows Surveyor assay performed on DNA untreated (left) or treated (right) with plasmid-Safe DNase to remove non-episomal viral forms. Arrowheads indicate shorter amplicons resulting from indel formation. The low levels of indel formation in 17M likely result from inefficient cutting enabled by the 5 bp bulge between target DNA and gRNA, recently appreciated in Lin, Y et al., (2014). (b-c) *p<0.05 for selected comparison; **p<0.01 for selected comparison, as assessed by one-way ANOVA with Tukey post-hoc test.

[0335] FIG. 73 depicts a plot where the columns labeled ‘D’ signify where Applicants used a nuclease-deficient Cas9 as an internal control. The 29 dpt corresponds to 29 days post transduction, where a single lentiviral vector encoding U6-sgRNA and EFS-hSpCas9-2A-Puro was transduced into HepG2.2.15 cells followed by selection with puromycin.

[0336] The figures herein are for illustrative purposes only and are not necessarily drawn to scale.

### DETAILED DESCRIPTION OF THE INVENTION

[0337] With respect to general information on CRISPR-Cas Systems, components thereof, and delivery of such components, including methods, materials, delivery vehicles, vectors, particles, AAV, and making and using thereof, including as to amounts and formulations, all useful in the practice of the instant invention, reference is made to: U.S. Pat. Nos. 8,697,359, 8,771,945, 8,795,965, 8,865,406, 8,871,445, 8,889,356, 8,889,418 and 8,895,308; US Patent Publications US 2014-0310830 (U.S. application Ser. No. 14/105,031), US 2014-0287938 A1 (U.S. application Ser. No. 14/213,991), US 2014-0273234 A1 (U.S. application Ser. No. 14/293,674), US2014-0273232 A1 (U.S. application Ser. No. 14/290,575), US 2014-0273231 (U.S. application Ser. No. 14/259,420), US 2014-0256046 A1 (U.S. application Ser. No. 14/226,274), US 2014-0248702 A1 (U.S. application Ser. No. 14/258,458), US 2014-0242700 A1 (U.S. application Ser. No. 14/222,930), US 2014-0242699 A1 (U.S. application Ser. No. 14/183,512), US 2014-0242664 A1 (U.S. application Ser. No. 14/104,990), US 2014-0234972 A1 (U.S. application Ser. No. 14/183,471), US 2014-0227787 A1 (U.S. application Ser. No. 14/256,912), US 2014-0189896 A1 (U.S. application Ser. No. 14/105,035), US 2014-0186958 (U.S. application Ser. No. 14/105,017), US 2014-0186919 A1 (U.S. application Ser. No. 14/104,977), US 2014-0186843 A1 (U.S. application Ser. No. 14/104,900), US 2014-0179770 A1 (U.S. application Ser. No. 14/104,837) and US 2014-0179006 A1 (U.S. application Ser. No. 14/183,486), US 2014-0170753 (U.S. application Ser. No. 14/183,429); European Patent Applications EP 2 771 468 (EP13818570.7), EP 2 764 103 (EP13824232.6), and EP 2 784 162 (EP14170383.5); and PCT Patent Publications WO 2014/093661 (PCT/US2013/074743), WO 2014/093694 (PCT/US2013/074790), WO 2014/093595 (PCT/US2013/074611), WO 2014/093718 (PCT/US2013/074825), WO 2014/093709 (PCT/US2013/074812), WO 2014/093622 (PCT/US2013/074667), WO 2014/093635 (PCT/US2013/074691), WO 2014/093655 (PCT/US2013/074736), WO 2014/093712 (PCT/US2013/074819), WO2014/093701 (PCT/US2013/074800), and WO2014/018423 (PCT/US2013/051418). Reference is also made to U.S. provisional patent applications 61/758,468; 61/802,174; 61/806,375; 61/814,263; 61/819,803 and 61/828,130, filed on Jan. 30, 2013; Mar. 15, 2013; Mar. 28, 2013; Apr. 20, 2013; May 6, 2013 and May 28, 2013 respectively. Reference is also made to U.S. provisional patent application 61/836,123, filed on Jun. 17, 2013. Reference is additionally made to U.S. provisional patent applications 61/835,931, 61/835,936, 61/836,127, 61/836,101, 61/836,080 and 61/835,973, each filed Jun. 17, 2013. Further reference is made to U.S. provisional patent applications 61/862,468 and 61/862,355 filed on Aug. 5, 2013; 61/871,301 filed on Aug. 28, 2013; 61/960,777 filed on Sep. 25, 2013 and 61/961,980 filed on Oct. 28, 2013. Reference is yet further made to: PCT Patent applications Nos: PCT/US2014/041803, PCT/US2014/041800, PCT/US2014/041809, PCT/US2014/041804 and PCT/US2014/041806, each filed Jun. 10, 2014 Jun. 10, 2014; PCT/US2014/041808 filed Jun. 11, 2014; and PCT/US2014/62558 filed Oct. 28, 2014, and U.S. Provisional Patent Applications Ser. Nos. 61/915,150, 61/915,301, 61/915,267 and 61/915,260, each filed Dec. 12, 2013; 61/757,972 and 61/768,959, filed on Jan. 29, 2013 and Feb. 25, 2013; 61/835,936, 61/836,127, 61/836,101, 61/836,080, 61/835,973, and 61/835,931, filed Jun. 17, 2013; 62/010,888 and 62/010,879, both filed Jun. 11, 2014; 62/010,329 and 62/010,441, each filed Jun. 10, 2014; 61/939,228 and 61/939,242, each filed Feb. 12, 2014; 61/980,012, filed Apr. 15, 2014; 62/038,358, filed Aug. 17, 2014; 62/054,490, 62/055,484, 62/055,460 and 62/055,487, each filed Sep. 25, 2014; and 62/069,243, filed Oct. 27, 2014. Reference is also made to U.S. provisional patent applications Nos. 62/055,484, 62/055,460, and 62/055,487, filed Sep. 25, 2014; U.S. provisional patent application 61/980,012, filed Apr. 15, 2014; and U.S. provisional patent application 61/939,242 filed Feb. 12, 2014. Reference is made to PCT application designating, inter alia, the United States, application No. PCT/US14/41806, filed Jun. 10, 2014. Reference is made to U.S. provisional patent application 61/930,214 filed on Jan. 22, 2014. Reference is made to U.S. provisional patent applications 61/915,251; 61/915,260 and 61/915,267, each filed on Dec. 12, 2013. Reference is made to US provisional patent application U.S. Ser. No. 61/980,012 filed Apr. 15, 2014. Reference is made to PCT application designating, inter alia, the United States, application No. PCT/US14/41806, filed Jun. 10, 2014. Reference is made to U.S. provisional patent application 61/930,214 filed on Jan. 22, 2014. Reference is made to U.S. provisional patent applications 61/915,251; 61/915,260 and 61/915,267, each filed on Dec. 12, 2013. Each of these patents, patent publications, and applications, and all documents cited therein or during their prosecution (“appln cited documents”) and all documents cited or referenced in the appln cited documents, together with any instructions, descriptions, product specifications, and product sheets for any products mentioned therein or in any document therein and incorporated by reference herein, are hereby incorporated herein by reference, and may be employed in the practice of the invention. All documents (e.g., these patents, patent publications and applications and the appln cited documents) are incorporated herein by reference to the same extent as if each individual document was specifically and individually indicated to be incorporated by reference.

[0338] Also with respect to general information on CRISPR-Cas Systems, mention is made of the following (also hereby incorporated herein by reference):
[0339] Multiplex genome engineering using CRISPR/Cas systems. Cong, L., Ran, F. A., Cox, D., Lin, S., Barretto, R., Habib, N., Hsu, P. D., Wu, X., Jiang, W., Marraffini, L. A., & Zhang, F. Science February 15; 339 (6121): 819-23 (2013);
[0340] RNA-guided editing of bacterial genomes using CRISPR-Cas systems. Jiang W., Bikard D., Cox D., Zhang F, Marraffini L A. Nat Biotechnol March; 31 (3): 233-9 (2013);
[0341] One-Step Generation of Mice Carrying Mutations in Multiple Genes by CRISPR/Cas-Mediated Genome Engineering. Wang H., Yang H., Shivalila C S., Dawlaty M M., Cheng A W., Zhang F., Jaenisch R. Cell May 9; 153 (4): 910-8 (2013);
[0342] Optical control of mammalian endogenous transcription and epigenetic states. Konermann S, Brigham M D, Trevino A E, Hsu P D, Heidenreich M, Cong L, Platt R J, Scott D A, Church G M, Zhang F. Nature. 2013 Aug. 22; 500 (7463): 472-6. doi: 10.1038/Nature12466. Epub 2013 Aug. 23;
[0343] Double Nicking by RNA-Guided CRISPR Cas9 for Enhanced Genome Editing Specificity. Ran, FA., Hsu, PD., Lin, CY., Gootenberg, J S., Konermann, S., Trevino, AE., Scott, DA., Inoue, A., Matoba, S., Zhang, Y., & Zhang, F. Cell August 28. pii: S0092-8674 (13) 01015-5. (2013);
[0344] DNA targeting specificity of RNA-guided Cas9 nucleases. Hsu, P., Scott, D., Weinstein, J., Ran, FA., Konermann, S., Agarwala, V., Li, Y., Fine, E., Wu, X., Shalem, O., Cradick, TJ., Marraffini, LA., Bao, G., & Zhang, F. Nat Biotechnol doi: 10.1038/nbt.2647 (2013);
[0345] Genome engineering using the CRISPR-Cas9 system. Ran, FA., Hsu, PD., Wright, J., Agarwala, V., Scott, DA., Zhang, F. Nature Protocols November; 8 (11): 2281-308. (2013);
[0346] Genome-Scale CRISPR-Cas9 Knockout Screening in Human Cells. Shalem, O., Sanjana, NE., Hartenian, E., Shi, X., Scott, DA., Mikkelson, T., Heckl, D., Ebert, BL., Root, DE., Doench, JG., Zhang, F. Science December 12. (2013). [Epub ahead of print];
[0347] Crystal structure of cas9 in complex with guide RNA and target DNA. Nishimasu, H., Ran, FA., Hsu, PD., Konermann, S., Shehata, SI., Dohmae, N., Ishitani, R., Zhang, F., Nureki, O. Cell February 27. (2014). 156 (5): 935-49;
[0348] Genome-wide binding of the CRISPR endonuclease Cas9 in mammalian cells. Wu X., Scott D A., Kriz A J., Chiu A C., Hsu P D., Dadon D B., Cheng A W., Trevino A E., Konermann S., Chen S., Jaenisch R., Zhang F., Sharp P A. Nat Biotechnol. (2014) April 20. doi: 10.1038/nbt.2889,
[0349] CRISPR-Cas9 Knockin Mice for Genome Editing and Cancer Modeling, Platt et al., Cell 159 (2): 440-455 (2014) DOI: 10.1016/j.cell.2014.09.014,
[0350] Development and Applications of CRISPR-Cas9 for Genome Engineering, Hsu et al, Cell 157, 1262-1278 (Jun. 5, 2014) (Hsu 2014),
[0351] Genetic screens in human cells using the CRISPR/Cas9 system, Wang et al., Science. 2014 Jan. 3; 343 (6166): 80-84. doi: 10.1126/science. 1246981,
[0352] Rational design of highly active sgRNAs for CRISPR-Cas9-mediated gene inactivation, Doench et al., Nature Biotechnology published online 3 Sep. 2014; doi: 10.1038/nbt.3026, and
[0353] In vivo interrogation of gene function in the mammalian brain using CRISPR-Cas9, Swiech et al, Nature Biotechnology; published online 19 Oct. 2014; doi: 10.1038/nbt.3055.
   each of which is incorporated herein by reference, and discussed briefly below:

[0354] Cong et al. engineered type II CRISPR/Cas systems for use in eukaryotic cells based on both Streptococcus thermophilus Cas9 and also Streptoccocus pyogenes Cas9 and demonstrated that Cas9 nucleases can be directed by short RNAs to induce precise cleavage of DNA in human and mouse cells. Their study further showed that Cas9 as converted into a nicking enzyme can be used to facilitate homology-directed repair in eukaryotic cells with minimal mutagenic activity. Additionally, their study demonstrated that multiple guide sequences can be encoded into a single CRISPR array to enable simultaneous editing of several at endogenous genomic loci sites within the mammalian genome, demonstrating easy programmability and wide applicability of the RNA-guided nuclease technology. This ability to use RNA to program sequence specific DNA cleavage in cells defined a new class of genome engineering tools. These studies further showed that other CRISPR loci are likely to be transplantable into mammalian cells and can also mediate mammalian genome cleavage. Importantly, it can be envisaged that several aspects of the CRISPR/Cas system can be further improved to increase its efficiency and versatility.

[0355] Jiang et al. used the clustered, regularly interspaced, short palindromic repeats (CRISPR)-associated Cas9 endonuclease complexed with dual-RNAs to introduce precise mutations in the genomes of Streptococcus pneumoniae and Escherichia coli. The approach relied on dual-RNA:Cas9-directed cleavage at the targeted genomic site to kill unmutated cells and circumvents the need for selectable markers or counter-selection systems. The study reported reprogramming dual-RNA:Cas9 specificity by changing the sequence of short CRISPR RNA (crRNA) to make single- and multinucleotide changes carried on editing templates. The study showed that simultaneous use of two crRNAs enabled multiplex mutagenesis. Furthermore, when the approach was used in combination with recombineering, in S. pneumoniae, nearly 100% of cells that were recovered using the described approach contained the desired mutation, and in E. coli, 65% that were recovered contained the mutation.

[0356] Konermann et al. addressed the need in the art for versatile and robust technologies that enable optical and chemical modulation of DNA-binding domains based CRISPR Cas9 enzyme and also Transcriptional Activator Like Effectors

[0357] Cas9 nuclease from the microbial CRISPR-Cas system is targeted to specific genomic loci by a 20 nt guide sequence, which can tolerate certain mismatches to the DNA target and thereby promote undesired off-target mutagenesis. To address this, Ran et al. described an approach that combined a Cas9 nickase mutant with paired guide RNAs to introduce targeted double-strand breaks. Because individual nicks in the genome are repaired with high fidelity, simultaneous nicking via appropriately offset guide RNAs is required for double-stranded breaks and extends the number of specifically recognized bases for target cleavage. The authors demonstrated that using paired nicking can reduce off-target activity by 50- to 1,500-fold in cell lines and to facilitate gene knockout in mouse zygotes without sacrificing on-target cleavage efficiency. This versatile strategy enables a wide variety of genome editing applications that require high specificity.

[0358] Hsu et al. characterized SpCas9 targeting specificity in human cells to inform the selection of target sites and avoid off-target effects. The study evaluated >700 guide RNA variants and SpCas9-induced indel mutation levels at >100 predicted genomic off-target loci in 293T and 293 FT cells. The authors reported that SpCas9 tolerates mismatches between guide RNA and target DNA at different positions in a sequence-dependent manner, sensitive to the number, position and distribution of mismatches. The authors further showed that SpCas9-mediated cleavage is unaffected by DNA methylation and that the dosage of SpCas9 and sgRNA can be titrated to minimize off-target modification. Additionally, to facilitate mammalian genome engineering applications, the authors reported providing a web-based software tool to guide the selection and validation of target sequences as well as off-target analyses.

[0359] Ran et al. described a set of tools for Cas9-mediated genome editing via non-homologous end joining (NHEJ) or homology-directed repair (HDR) in mammalian cells, as well as generation of modified cell lines for downstream functional studies. To minimize off-target cleavage, the authors further described a double-nicking strategy using the Cas9 nickase mutant with paired guide RNAs. The protocol provided by the authors experimentally derived guidelines for the selection of target sites, evaluation of cleavage efficiency and analysis of off-target activity. The studies showed that beginning with target design, gene modifications can be achieved within as little as 1-2 weeks, and modified clonal cell lines can be derived within 2-3 weeks.

[0360] Shalem et al. described a new way to interrogate gene function on a genome-wide scale. Their studies showed that delivery of a genome-scale CRISPR-Cas9 knockout (GeCKO) library targeted 18,080 genes with 64,751 unique guide sequences enabled both negative and positive selection screening in human cells. First, the authors showed use of the GeCKO library to identify genes essential for cell viability in cancer and pluripotent stem cells. Next, in a melanoma model, the authors screened for genes whose loss is involved in resistance to vemurafenib, a therapeutic that inhibits mutant protein kinase BRAF. Their studies showed that the highest-ranking candidates included previously validated genes NF1 and MED12 as well as novel hits NF2, CUL3, TADA2B, and TADA1. The authors observed a high level of consistency between independent guide RNAs targeting the same gene and a high rate of hit confirmation, and thus demonstrated the promise of genome-scale screening with Cas9.

[0361] Nishimasu et al. reported the crystal structure of Streptococcus pyogenes Cas9 in complex with sgRNA and its target DNA at 2.5 A° resolution. The structure revealed a bilobed architecture composed of target recognition and nuclease lobes, accommodating the sgRNA:DNA heteroduplex in a positively charged groove at their interface. Whereas the recognition lobe is essential for binding sgRNA and DNA, the nuclease lobe contains the HNH and RuvC nuclease domains, which are properly positioned for cleavage of the complementary and non-complementary strands of the target DNA, respectively. The nuclease lobe also contains a carboxyl-terminal domain responsible for the interaction with the protospacer adjacent motif (PAM). This high-resolution structure and accompanying functional analyses have revealed the molecular mechanism of RNA-guided DNA targeting by Cas9, thus paving the way for the rational design of new, versatile genome-editing technologies.

[0362] Wu et al. mapped genome-wide binding sites of a catalytically inactive Cas9 (dCas9) from Streptococcus pyogenes loaded with single guide RNAs (sgRNAs) in mouse embryonic stem cells (mESCs). The authors showed that each of the four sgRNAs tested targets dCas9 to between tens and thousands of genomic sites, frequently characterized by a 5-nucleotide seed region in the sgRNA and an NGG protospacer adjacent motif (PAM). Chromatin inaccessibility decreases dCas9 binding to other sites with matching seed sequences; thus 70% of off-target sites are associated with genes. The authors showed that targeted sequencing of 295 dCas9 binding sites in mESCs transfected with catalytically active Cas9 identified only one site mutated above background levels. The authors proposed a two-state model for Cas9 binding and cleavage, in which a seed match triggers binding but extensive pairing with target DNA is required for cleavage.

[0363] Hsu 2014 is a review article that discusses generally CRISPR-Cas9 history from yogurt to genome editing, including genetic screening of cells, that is in the information, data and findings of the applications in the lineage of this specification filed prior to Jun. 5, 2014. The general teachings of Hsu 2014 do not involve the specific models, animals of the instant specification.

[0364] Mention is also made of Tsai et al, “Dimeric CRISPR RNA-guided FokI nucleases for highly specific genome editing,” Nature Biotechnology 32 (6): 569-77 (2014) which is not believed to be prior art to the instant invention or application, but which may be considered in the practice of the instant invention.

[0365] In general, the CRISPR-Cas or CRISPR system is as used in the foregoing documents, such as WO 2014/093622 (PCT/US2013/074667) and refers collectively to transcripts and other elements involved in the expression of or directing the activity of CRISPR-associated (“Cas”) genes, including sequences encoding a Cas gene, a tracr (trans-activating CRISPR) sequence (e.g. tracrRNA or an active partial tracrRNA), a tracr-mate sequence (encompassing a “direct repeat” and a tracrRNA-processed partial direct repeat in the context of an endogenous CRISPR system), a guide sequence (also referred to as a “spacer” in the context of an endogenous CRISPR system), or “RNA(s)” as that term is herein used (e.g., RNA(s) to guide Cas9, e.g. CRISPR RNA and transactivating (tracr) RNA or a single guide RNA (sgRNA) (chimeric RNA)) or other sequences and transcripts from a CRISPR locus. In general, a CRISPR system is characterized by elements that promote the formation of a CRISPR complex at the site of a target sequence (also referred to as a protospacer in the context of an endogenous CRISPR system). In the context of formation of a CRISPR complex, “target sequence” refers to a sequence to which a guide sequence is designed to have complementarity, where hybridization between a target sequence and a guide sequence promotes the formation of a CRISPR complex. A target sequence may comprise any polynucleotide, such as DNA or RNA polynucleotides. In some embodiments, a target sequence is located in the nucleus or cytoplasm of a cell. In some embodiments, direct repeats may be identified in silico by searching for repetitive motifs that fulfill any or all of the following criteria: 1. found in a 2 Kb window of genomic sequence flanking the type II CRISPR locus; 2. span from 20 to 50 bp; and 3. interspaced by 20 to 50 bp. In some embodiments, 2 of these criteria may be used, for instance 1 and 2, 2 and 3, or 1 and 3. In some embodiments, all 3 criteria may be used.

[0366] In embodiments of the invention the terms guide sequence and guide RNA are used interchangeably as in foregoing cited documents such as WO 2014/093622 (PCT/US2013/074667). In general, a guide sequence is any polynucleotide sequence having sufficient complementarity with a target polynucleotide sequence to hybridize with the target sequence and direct sequence-specific binding of a CRISPR complex to the target sequence. In some embodiments, the degree of complementarity between a guide sequence and its corresponding target sequence, when optimally aligned using a suitable alignment algorithm, is about or more than about 50%, 60%, 75%, 80%, 85%, 90%, 95%, 97.5%, 99%, or more. Optimal alignment may be determined with the use of any suitable algorithm for aligning sequences, non-limiting example of which include the Smith-Waterman algorithm, the Needleman-Wunsch algorithm, algorithms based on the Burrows-Wheeler Transform (e.g. the Burrows Wheeler Aligner), ClustalW, Clustal X, BLAT, Novoalign (Novocraft Technologies; available at www.novocraft.com), ELAND (Illumina, San Diego, CA), SOAP (available at soap.genomics.org.cn), and Maq (available at maq.sourceforge.net). In some embodiments, a guide sequence is about or more than about 5, 10, 11, 12, 13, 14, 15, 16, 17, 18, 19, 20, 21, 22, 23, 24, 25, 26, 27, 28, 29, 30, 35, 40, 45, 50, 75, or more nucleotides in length. In some embodiments, a guide sequence is less than about 75, 50, 45, 40, 35, 30, 25, 20, 15, 12, or fewer nucleotides in length. Preferably the guide sequence is 10-30 nucleotides long. The ability of a guide sequence to direct sequence-specific binding of a CRISPR complex to a target sequence may be assessed by any suitable assay. For example, the components of a CRISPR system sufficient to form a CRISPR complex, including the guide sequence to be tested, may be provided to a host cell having the corresponding target sequence, such as by transfection with vectors encoding the components of the CRISPR sequence, followed by an assessment of preferential cleavage within the target sequence, such as by Surveyor assay as described herein. Similarly, cleavage of a target polynucleotide sequence may be evaluated in a test tube by providing the target sequence, components of a CRISPR complex, including the guide sequence to be tested and a control guide sequence different from the test guide sequence, and comparing binding or rate of cleavage at the target sequence between the test and control guide sequence reactions. Other assays are possible, and will occur to those skilled in the art. A guide sequence may be selected to target any target sequence. In some embodiments, the target sequence is a sequence within a genome of a cell. Exemplary target sequences include those that are unique in the target genome. For example, for the S. pyogenes Cas9, a unique target sequence in a genome may include a Cas9 target site of the form MMMMMMMMNNNNNNNNNNNNXGG (SEQ ID NO: 1) where NNNNNNNNNNNNXGG (SEQ ID NO: 2) (N is A, G, T, or C; and X can be anything) has a single occurrence in the genome. A unique target sequence in a genome may include an S. pyogenes Cas9 target site of the form MMMMMMMMMNNNNNNNNNNNXGG (SEQ ID NO: 3) where NNNNNNNNNNNXGG (SEQ ID NO: 4) (N is A, G, T, or C; and X can be anything) has a single occurrence in the genome. For the S. thermophilus CRISPR1 Cas9, a unique target sequence in a genome may include a Cas9 target site of the form MMMMMMMMNNNNNNNNNNNNXXAGAAW (SEQ ID NO: 5) where NNNNNNNNNNNNXXAGAAW (SEQ ID NO: 6) (N is A, G, T, or C; X can be anything; and W is A or T) has a single occurrence in the genome. A unique target sequence in a genome may include an S. thermophilus CRISPR1 Cas9 target site of the form MMMMMMMMMNNNNNNNNNNNXXAGAAW (SEQ ID NO: 7) where NNNNNNNNNNNXXAGAAW (SEQ ID NO: 8) (N is A, G, T, or C; X can be anything; and W is A or T) has a single occurrence in the genome. For the S. pyogenes Cas9, a unique target sequence in a genome may include a Cas9 target site of the form MMMMMMMMNNNNNNNNNNNNXGGXG (SEQ ID NO: 9) where NNNNNNNNNNNNXGGXG (SEQ ID NO: 10) (N is A, G, T, or C; and X can be anything) has a single occurrence in the genome. A unique target sequence in a genome may include an S. pyogenes Cas9 target site of the form MMMMMMMMMNNNNNNNNNNNXGGXG (SEQ ID NO: 11) where NNNNNNNNNNNXGGXG (SEQ ID NO: 12) (N is A, G, T, or C; and X can be anything) has a single occurrence in the genome. In each of these sequences “M” may be A, G, T, or C, and need not be considered in identifying a sequence as unique. In some embodiments, a guide sequence is selected to reduce the degree secondary structure within the guide sequence. In some embodiments, about or less than about 75%, 50%, 40%, 30%, 25%, 20%, 15%, 10%, 5%, 1%, or fewer of the nucleotides of the guide sequence participate in self-complementary base pairing when optimally folded. Optimal folding may be determined by any suitable polynucleotide folding algorithm. Some programs are based on calculating the minimal Gibbs free energy. An example of one such algorithm is mFold, as described by Zuker and Stiegler (Nucleic Acids Res. 9 (1981), 133-148). Another example folding algorithm is the online webserver RNAfold, developed at Institute for Theoretical Chemistry at the University of Vienna, using the centroid structure prediction algorithm (see e.g. A. R. Gruber et al., 2008, Cell 106 (1): 23-24; and PA Carr and GM Church, 2009, Nature Biotechnology 27 (12): 1151-62).

[0367] In general, a tracr mate sequence includes any sequence that has sufficient complementarity with a tracr sequence to promote one or more of: (1) excision of a guide sequence flanked by tracr mate sequences in a cell containing the corresponding tracr sequence; and (2) formation of a CRISPR complex at a target sequence, wherein the CRISPR complex comprises the tracr mate sequence hybridized to the tracr sequence. In general, degree of complementarity is with reference to the optimal alignment of the tracr mate sequence and tracr sequence, along the length of the shorter of the two sequences. Optimal alignment may be determined by any suitable alignment algorithm, and may further account for secondary structures, such as self-complementarity within either the tracr sequence or tracr mate sequence. In some embodiments, the degree of complementarity between the tracr sequence and tracr mate sequence along the length of the shorter of the two when optimally aligned is about or more than about 25%, 30%, 40%, 50%, 60%, 70%, 80%, 90%, 95%, 97.5%, 99%, or higher. In some embodiments, the tracr sequence is about or more than about 5, 6, 7, 8, 9, 10, 11, 12, 13, 14, 15, 16, 17, 18, 19, 20, 25, 30, 40, 50, or more nucleotides in length. In some embodiments, the tracr sequence and tracr mate sequence are contained within a single transcript, such that hybridization between the two produces a transcript having a secondary structure, such as a hairpin. In an embodiment of the invention, the transcript or transcribed polynucleotide sequence has at least two or more hairpins. In preferred embodiments, the transcript has two, three, four or five hairpins. In a further embodiment of the invention, the transcript has at most five hairpins. In a hairpin structure the portion of the sequence 5′ of the final “N” and upstream of the loop corresponds to the tracr mate sequence, and the portion of the sequence 3′ of the loop corresponds to the tracr sequence Further non-limiting examples of single polynucleotides comprising a guide sequence, a tracr mate sequence, and a tracr sequence are as follows (listed 5′ to 3′), where “N” represents a base of a guide sequence, the first block of lower case letters represent the tracr mate sequence, and the second block of lower case letters represent the tracr sequence, and the final poly-T sequence represents the transcription terminator: (1) NNNNNNNNNNNNNNNNNNNNgtttttgtactctcaagatttaGAAAtaaatcttgcagaagctacaaagataa ggcttcatgccgaaatcaacaccctgtcattttatggcagggtgttttcgttatttaaTTTTTT (SEQ ID NO: 13); (2) NNNNNNNNNNNNNNNNNNNNgtttttgtactctcaGAAAtgcagaagctacaaagataaggcttcatgccg aaatcaacaccctgtcattttatggcagggtgttttcgttatttaaTTTTTT (SEQ ID NO: 14); (3) NNNNNNNNNNNNNNNNNNNNgtttttgtactctcaGAAAtgcagaagctacaaagataaggcttcatgccg aaatcaacaccctgtcattttatggcagggtgtTTTTTT (SEQ ID NO: 15); (4) NNNNNNNNNNNNNNNNNNNNgttttagagctaGAAAtagcaagttaaaataaggctagtccgttatcaactt gaaaaagtggcaccgagtcggtgcTTTTTT (SEQ ID NO: 16); (5) NNNNNNNNNNNNNNNNNNNNgttttagagctaGAAATAGcaagttaaaataaggctagtccgttatcaac ttgaaaaagtgTTTTTTT (SEQ ID NO: 17); and (6) NNNNNNNNNNNNNNNNNNNNgttttagagctagAAATAGcaagttaaaataaggctagtccgttatcaTT TTTTTT (SEQ ID NO: 18). In some embodiments, sequences (1) to (3) are used in combination with Cas9 from S. thermophilus CRISPR1. In some embodiments, sequences (4) to (6) are used in combination with Cas9 from S. pyogenes. In some embodiments, the tracr sequence is a separate transcript from a transcript comprising the tracr mate sequence.

[0368] In some embodiments, candidate tracrRNA may be subsequently predicted by sequences that fulfill any or all of the following criteria: 1. sequence homology to direct repeats (motif search in Geneious with up to 18-bp mismatches); 2. presence of a predicted Rho-independent transcriptional terminator in direction of transcription; and 3. stable hairpin secondary structure between tracrRNA and direct repeat. In some embodiments, 2 of these criteria may be used, for instance 1 and 2, 2 and 3, or 1 and 3. In some embodiments, all 3 criteria may be used.

[0369] In some embodiments, chimeric synthetic guide RNAs (sgRNAs) designs may incorporate at least 12 bp of duplex structure between the direct repeat and tracrRNA.

[0370] For minimization of toxicity and off-target effect, it will be important to control the concentration of CRISPR enzyme mRNA and guide RNA delivered. Optimal concentrations of CRISPR enzyme mRNA and guide RNA can be determined by testing different concentrations in a cellular or non-human eukaryote animal model and using deep sequencing the analyze the extent of modification at potential off-target genomic loci. For example, for the guide sequence targeting 5′-GAGTCCGAGCAGAAGAAGAA-3′ (SEQ ID NO: 19) in the EMX1 gene of the human genome, deep sequencing can be used to assess the level of modification at the following two off-target loci, 1: 5′-GAGTCCTAGCAGGAGAAGAA-3′ (SEQ ID NO: 20) and 2: 5′-GAGTCTAAGCAGAAGAAGAA-3′ (SEQ ID NO: 21). The concentration that gives the highest level of on-target modification while minimizing the level of off-target modification should be chosen for in vivo delivery. Alternatively, to minimize the level of toxicity and off-target effect, CRISPR enzyme nickase mRNA (for example S. pyogenes Cas9 with the D10A mutation) can be delivered with a pair of guide RNAs targeting a site of interest. The two guide RNAs need to be spaced as follows. Guide sequences and strategies to minimize toxicity and off-target effects can be as in WO 2014/093622 (PCT/US2013/074667).

[0371] The CRISPR system is derived advantageously from a type II CRISPR system. In some embodiments, one or more elements of a CRISPR system is derived from a particular organism comprising an endogenous CRISPR system, such as Streptococcus pyogenes. In preferred embodiments of the invention, the CRISPR system is a type II CRISPR system and the Cas enzyme is Cas9, which catalyzes DNA cleavage. Non-limiting examples of Cas proteins include Cas1, Cas1B, Cas2, Cas3, Cas4, Cas5, Cas6, Cas7, Cas8, Cas9 (also known as Csn1 and Csx12), Cas10, Csy1, Csy2, Csy3, Cse1, Cse2, Csc1, Csc2, Csa5, Csn2, Csm2, Csm3, Csm4, Csm5, Csm6, Cmr1, Cmr3, Cmr4, Cmr5, Cmr6, Csb1, Csb2, Csb3, Csx17, Csx14, Csx10, Csx16, CsaX, Csx3, Csx1, Csx15, Csf1, Csf2, Csf3, Csf4, homologues thereof, or modified versions thereof.

[0372] In some embodiments, the unmodified CRISPR enzyme has DNA cleavage activity, such as Cas9. In some embodiments, the CRISPR enzyme directs cleavage of one or both strands at the location of a target sequence, such as within the target sequence and/or within the complement of the target sequence. In some embodiments, the CRISPR enzyme directs cleavage of one or both strands within about 1, 2, 3, 4, 5, 6, 7, 8, 9, 10, 15, 20, 25, 50, 100, 200, 500, or more base pairs from the first or last nucleotide of a target sequence. In some embodiments, a vector encodes a CRISPR enzyme that is mutated to with respect to a corresponding wild-type enzyme such that the mutated CRISPR enzyme lacks the ability to cleave one or both strands of a target polynucleotide containing a target sequence. For example, an aspartate-to-alanine substitution (D10A) in the RuvC I catalytic domain of Cas9 from S. pyogenes converts Cas9 from a nuclease that cleaves both strands to a nickase (cleaves a single strand). Other examples of mutations that render Cas9 a nickase include, without limitation, H840A, N854A, and N863A. As a further example, two or more catalytic domains of Cas9 (RuvC I, RuvC II, and RuvC III or the HNH domain) may be mutated to produce a mutated Cas9 substantially lacking all DNA cleavage activity. In some embodiments, a D10A mutation is combined with one or more of H840A, N854A, or N863A mutations to produce a Cas9 enzyme substantially lacking all DNA cleavage activity. In some embodiments, a CRISPR enzyme is considered to substantially lack all DNA cleavage activity when the DNA cleavage activity of the mutated enzyme is about no more than 25%, 10%, 5%, 1%, 0.1%, 0.01%, or less of the DNA cleavage activity of the non-mutated form of the enzyme; an example can be when the DNA cleavage activity of the mutated form is nil or negligible as compared with the non-mutated form. Where the enzyme is not SpCas9, mutations may be made at any or all residues corresponding to positions 10, 762, 840, 854, 863 and/or 986 of SpCas9 (which may be ascertained for instance by standard sequence comparison tools). In particular, any or all of the following mutations are preferred in SpCas9: D10A, E762A, H840A, N854A, N863A and/or D986A; as well as conservative substitution for any of the replacement amino acids is also envisaged. The same (or conservative substitutions of these mutations) at corresponding positions in other Cases are also preferred. Particularly preferred are D10 and H840 in SpCas9. However, in other Cas9s, residues corresponding to SpCas9 D10 and H840 are also preferred. Orthologs of SpCas9 can be used in the practice of the invention. A Cas enzyme may be identified Cas9 as this can refer to the general class of enzymes that share homology to the biggest nuclease with multiple nuclease domains from the type II CRISPR system. Most preferably, the Cas9 enzyme is from, or is derived from, spCas9 (S. pyogenes Cas9) or saCas9 (S. aureus Cas9). StCas9″ refers to wild type Cas9 from S. thermophilus, the protein sequence of which is given in the SwissProt database under accession number G3ECR1. Similarly, S pyogenes Cas9 or spCas9 is included in SwissProt under accession number Q99ZW2. By derived, Applicants mean that the derived enzyme is largely based, in the sense of having a high degree of sequence homology with, a wildtype enzyme, but that it has been mutated (modified) in some way as described herein. It will be appreciated that the terms Cas and CRISPR enzyme are generally used herein interchangeably, unless otherwise apparent. As mentioned above, many of the residue numberings used herein refer to the Cas9 enzyme from the type II CRISPR locus in Streptococcus pyogenes. However, it will be appreciated that this invention includes many more Cas9s from other species of microbes, such as SpCas9, SaCa9, StlCas9 and so forth. Enzymatic action by Cas9 derived from Streptococcus pyogenes or any closely related Cas9 generates double stranded breaks at target site sequences which hybridize to 20 nucleotides of the guide sequence and that have a protospacer-adjacent motif (PAM) sequence (examples include NGG/NRG or a PAM that can be determined as described herein) following the 20 nucleotides of the target sequence. CRISPR activity through Cas9 for site-specific DNA recognition and cleavage is defined by the guide sequence, the tracr sequence that hybridizes in part to the guide sequence and the PAM sequence. More aspects of the CRISPR system are described in Karginov and Hannon, The CRISPR system: small RNA-guided defence in bacteria and archaea, Mole Cell 2010 January 15; 37 (1): 7. The type II CRISPR locus from Streptococcus pyogenes SF370, which contains a cluster of four genes Cas9, Cas1, Cas2, and Csn1, as well as two non-coding RNA elements, tracrRNA and a characteristic array of repetitive sequences (direct repeats) interspaced by short stretches of non-repetitive sequences (spacers, about 30 bp each). In this system, targeted DNA double-strand break (DSB) is generated in four sequential steps. First, two non-coding RNAs, the pre-crRNA array and tracrRNA, are transcribed from the CRISPR locus. Second, tracrRNA hybridizes to the direct repeats of pre-crRNA, which is then processed into mature crRNAs containing individual spacer sequences. Third, the mature crRNA:tracrRNA complex directs Cas9 to the DNA target consisting of the protospacer and the corresponding PAM via heteroduplex formation between the spacer region of the crRNA and the protospacer DNA. Finally, Cas9 mediates cleavage of target DNA upstream of PAM to create a DSB within the protospacer. A pre-crRNA array consisting of a single spacer flanked by two direct repeats (DRs) is also encompassed by the term “tracr-mate sequences”). In certain embodiments, Cas9 may be constitutively present or inducibly present or conditionally present or administered or delivered. Cas9 optimization may be used to enhance function or to develop new functions, one can generate chimeric Cas9 proteins. And Cas9 may be used as a generic DNA binding protein.

[0373] Typically, in the context of an endogenous CRISPR system, formation of a CRISPR complex (comprising a guide sequence hybridized to a target sequence and complexed with one or more Cas proteins) results in cleavage of one or both strands in or near (e.g. within 1, 2, 3, 4, 5, 6, 7, 8, 9, 10, 20, 50, or more base pairs from) the target sequence. Without wishing to be bound by theory, the tracr sequence, which may comprise or consist of all or a portion of a wild-type tracr sequence (e.g. about or more than about 20, 26, 32, 45, 48, 54, 63, 67, 85, or more nucleotides of a wild-type tracr sequence), may also form part of a CRISPR complex, such as by hybridization along at least a portion of the tracr sequence to all or a portion of a tracr mate sequence that is operably linked to the guide sequence.

[0374] An example of a codon optimized sequence, is in this instance a sequence optimized for expression in a eukaryote, e.g., humans (i.e. being optimized for expression in humans), or for another eukaryote, animal or mammal as herein discussed; see, e.g., SaCas9 human codon optimized sequence in WO 2014/093622 (PCT/US2013/074667). Whilst this is preferred, it will be appreciated that other examples are possible and codon optimization for a host species other than human, or for codon optimization for specific organs is known. In some embodiments, an enzyme coding sequence encoding a CRISPR enzyme is codon optimized for expression in particular cells, such as eukaryotic cells. The eukaryotic cells may be those of or derived from a particular organism, such as a mammal, including but not limited to human, or non-human eukaryote or animal or mammal as herein discussed, e.g., mouse, rat, rabbit, dog, livestock, or non-human mammal or primate. In some embodiments, processes for modifying the germ line genetic identity of human beings and/or processes for modifying the genetic identity of animals which are likely to cause them suffering without any substantial medical benefit to man or animal, and also animals resulting from such processes, may be excluded. In general, codon optimization refers to a process of modifying a nucleic acid sequence for enhanced expression in the host cells of interest by replacing at least one codon (e.g. about or more than about 1, 2, 3, 4, 5, 10, 15, 20, 25, 50, or more codons) of the native sequence with codons that are more frequently or most frequently used in the genes of that host cell while maintaining the native amino acid sequence. Various species exhibit particular bias for certain codons of a particular amino acid. Codon bias (differences in codon usage between organisms) often correlates with the efficiency of translation of messenger RNA (mRNA), which is in turn believed to be dependent on, among other things, the properties of the codons being translated and the availability of particular transfer RNA (tRNA) molecules. The predominance of selected tRNAs in a cell is generally a reflection of the codons used most frequently in peptide synthesis. Accordingly, genes can be tailored for optimal gene expression in a given organism based on codon optimization. Codon usage tables are readily available, for example, at the “Codon Usage Database” available at www.kazusa.orjp/codon/and these tables can be adapted in a number of ways. See Nakamura, Y., et al. “Codon usage tabulated from the international DNA sequence databases: status for the year 2000” Nucl. Acids Res. 28:292 (2000). Computer algorithms for codon optimizing a particular sequence for expression in a particular host cell are also available, such as Gene Forge (Aptagen; Jacobus, PA), are also available. In some embodiments, one or more codons (e.g. 1, 2, 3, 4, 5, 10, 15, 20, 25, 50, or more, or all codons) in a sequence encoding a CRISPR enzyme correspond to the most frequently used codon for a particular amino acid.

[0375] In some embodiments, a vector encodes a CRISPR enzyme comprising one or more nuclear localization sequences (NLSs), such as about or more than about 1, 2, 3, 4, 5, 6, 7, 8, 9, 10, or more NLSs. In some embodiments, the CRISPR enzyme comprises about or more than about 1, 2, 3, 4, 5, 6, 7, 8, 9, 10, or more NLSs at or near the amino-terminus, about or more than about 1, 2, 3, 4, 5, 6, 7, 8, 9, 10, or more NLSs at or near the carboxy-terminus, or a combination of these (e.g. zero or at least one or more NLS at the amino-terminus and zero or at one or more NLS at the carboxy terminus). When more than one NLS is present, each may be selected independently of the others, such that a single NLS may be present in more than one copy and/or in combination with one or more other NLSs present in one or more copies. In a preferred embodiment of the invention, the CRISPR enzyme comprises at most 6 NLSs. In some embodiments, an NLS is considered near the N- or C-terminus when the nearest amino acid of the NLS is within about 1, 2, 3, 4, 5, 10, 15, 20, 25, 30, 40, 50, or more amino acids along the polypeptide chain from the N- or C-terminus. Non-limiting examples of NLSs include an NLS sequence derived from: the NLS of the SV40 virus large T-antigen, having the amino acid sequence PKKKRKV (SEQ ID NO: 22); the NLS from nucleoplasmin (e.g. the nucleoplasmin bipartite NLS with the sequence KRPAATKKAGQAKKKK (SEQ ID NO: 23)); the c-myc NLS having the amino acid sequence PAAKRVKLD (SEQ ID NO: 24) or RQRRNELKRSP (SEQ ID NO: 25); the hRNPA1 M9 NLS having the sequence NQSSNFGPMKGGNFGGRSSGPYGGGGQYFAKPRNQGGY (SEQ ID NO: 26); the sequence RMRIZFKNKGKDTAELRRRRVEVSVELRKAKKDEQILKRRNV (SEQ ID NO: 27) of the IBB domain from importin-alpha; the sequences VSRKRPRP (SEQ ID NO: 28) and PPKKARED (SEQ ID NO: 29) of the myoma T protein; the sequence PQPKKKPL (SEQ ID NO: 30) of human p53; the sequence SALIKKKKKMAP (SEQ ID NO: 31) of mouse c-abl IV; the sequences DRLRR (SEQ ID NO: 32) and PKQKKRK (SEQ ID NO: 33) of the influenza virus NS1; the sequence RKLKKKIKKL (SEQ ID NO: 34) of the Hepatitis virus delta antigen; the sequence REKKKFLKRR (SEQ ID NO: 35) of the mouse Mx1 protein; the sequence KRKGDEVDGVDEVAKKKSKK (SEQ ID NO: 36) of the human poly(ADP-ribose) polymerase; and the sequence RKCLQAGMNLEARKTKK (SEQ ID NO: 37) of the steroid hormone receptors (human) glucocorticoid. In general, the one or more NLSs are of sufficient strength to drive accumulation of the CRISPR enzyme in a detectable amount in the nucleus of a eukaryotic cell. In general, strength of nuclear localization activity may derive from the number of NLSs in the CRISPR enzyme, the particular NLS(s) used, or a combination of these factors. Detection of accumulation in the nucleus may be performed by any suitable technique. For example, a detectable marker may be fused to the CRISPR enzyme, such that location within a cell may be visualized, such as in combination with a means for detecting the location of the nucleus (e.g. a stain specific for the nucleus such as DAPI). Cell nuclei may also be isolated from cells, the contents of which may then be analyzed by any suitable process for detecting protein, such as immunohistochemistry, Western blot, or enzyme activity assay. Accumulation in the nucleus may also be determined indirectly, such as by an assay for the effect of CRISPR complex formation (e.g. assay for DNA cleavage or mutation at the target sequence, or assay for altered gene expression activity affected by CRISPR complex formation and/or CRISPR enzyme activity), as compared to a control no exposed to the CRISPR enzyme or complex, or exposed to a CRISPR enzyme lacking the one or more NLSs.

[0376] Aspects of the invention relate to the expression of the gene product being decreased or a template polynucleotide being further introduced into the DNA molecule encoding the gene product or an intervening sequence being excised precisely by allowing the two 5′ overhangs to reanneal and ligate or the activity or function of the gene product being altered or the expression of the gene product being increased. In an embodiment of the invention, the gene product is a protein. Only sgRNA pairs creating 5′ overhangs with less than 8 bp overlap between the guide sequences (offset greater than-8 bp) were able to mediate detectable indel formation. Importantly, each guide used in these assays is able to efficiently induce indels when paired with wildtype Cas9, indicating that the relative positions of the guide pairs are the most important parameters in predicting double nicking activity. Since Cas9n and Cas9H840A nick opposite strands of DNA, substitution of Cas9n with Cas9H840A with a given sgRNA pair should have resulted in the inversion of the overhang type; but no indel formation is observed as with Cas9H840A indicating that Cas9H840A is a CRISPR enzyme substantially lacking all DNA cleavage activity (which is when the DNA cleavage activity of the mutated enzyme is about no more than 25%, 10%, 5%, 1%, 0.1%, 0.01%, or less of the DNA cleavage activity of the non-mutated form of the enzyme; whereby an example can be when the DNA cleavage activity of the mutated form is nil or negligible as compared with the non-mutated form, e.g., when no indel formation is observed as with Cas9H840A in the eukaryotic system in contrast to the biochemical or prokaryotic systems). Nonetheless, a pair of sgRNAs that will generate a 5′ overhang with Cas9n should in principle generate the corresponding 3′ overhang instead, and double nicking. Therefore, sgRNA pairs that lead to the generation of a 3′ overhang with Cas9n can be used with another mutated Cas9 to generate a 5′ overhang, and double nicking. Accordingly, in some embodiments, a recombination template is also provided. A recombination template may be a component of another vector as described herein, contained in a separate vector, or provided as a separate polynucleotide. In some embodiments, a recombination template is designed to serve as a template in homologous recombination, such as within or near a target sequence nicked or cleaved by a CRISPR enzyme as a part of a CRISPR complex. A template polynucleotide may be of any suitable length, such as about or more than about 10, 15, 20, 25, 50, 75, 100, 150, 200, 500, 1000, or more nucleotides in length. In some embodiments, the template polynucleotide is complementary to a portion of a polynucleotide comprising the target sequence. When optimally aligned, a template polynucleotide might overlap with one or more nucleotides of a target sequences (e.g. about or more than about 1, 5, 10, 15, 20, or more nucleotides). In some embodiments, when a template sequence and a polynucleotide comprising a target sequence are optimally aligned, the nearest nucleotide of the template polynucleotide is within about 1, 5, 10, 15, 20, 25, 50, 75, 100, 200, 300, 400, 500, 1000, 5000, 10000, or more nucleotides from the target sequence.

[0377] In some embodiments, one or more vectors driving expression of one or more elements of a CRISPR system are introduced into a host cell such that expression of the elements of the CRISPR system direct formation of a CRISPR complex at one or more target sites. For example, a Cas enzyme, a guide sequence linked to a tracr-mate sequence, and a tracr sequence could each be operably linked to separate regulatory elements on separate vectors. Or, RNA(s) of the CRISPR System can be delivered to a transgenic Cas9 animal or mammal, e.g., an animal or mammal that constitutively or inducibly or conditionally expresses Cas9; or an animal or mammal that is otherwise expressing Cas9 or has cells containing Cas9, such as by way of prior administration thereto of a vector or vectors that code for and express in vivo Cas9. Alternatively, two or more of the elements expressed from the same or different regulatory elements, may be combined in a single vector, with one or more additional vectors providing any components of the CRISPR system not included in the first vector. CRISPR system elements that are combined in a single vector may be arranged in any suitable orientation, such as one element located 5′ with respect to (“upstream” of) or 3′ with respect to (“downstream” of) a second element. The coding sequence of one element may be located on the same or opposite strand of the coding sequence of a second element, and oriented in the same or opposite direction. In some embodiments, a single promoter drives expression of a transcript encoding a CRISPR enzyme and one or more of the guide sequence, tracr mate sequence (optionally operably linked to the guide sequence), and a tracr sequence embedded within one or more intron sequences (e.g. each in a different intron, two or more in at least one intron, or all in a single intron). In some embodiments, the CRISPR enzyme, guide sequence, tracr mate sequence, and tracr sequence are operably linked to and expressed from the same promoter. Delivery vehicles, vectors, particles, nanoparticles, formulations and components thereof for expression of one or more elements of a CRISPR system are as used in the foregoing documents, such as WO 2014/093622 (PCT/US2013/074667). In some embodiments, a vector comprises one or more insertion sites, such as a restriction endonuclease recognition sequence (also referred to as a “cloning site”). In some embodiments, one or more insertion sites (e.g. about or more than about 1, 2, 3, 4, 5, 6, 7, 8, 9, 10, or more insertion sites) are located upstream and/or downstream of one or more sequence elements of one or more vectors. In some embodiments, a vector comprises an insertion site upstream of a tracr mate sequence, and optionally downstream of a regulatory element operably linked to the tracr mate sequence, such that following insertion of a guide sequence into the insertion site and upon expression the guide sequence directs sequence-specific binding of a CRISPR complex to a target sequence in a eukaryotic cell. In some embodiments, a vector comprises two or more insertion sites, each insertion site being located between two tracr mate sequences so as to allow insertion of a guide sequence at each site. In such an arrangement, the two or more guide sequences may comprise two or more copies of a single guide sequence, two or more different guide sequences, or combinations of these. When multiple different guide sequences are used, a single expression construct may be used to target CRISPR activity to multiple different, corresponding target sequences within a cell. For example, a single vector may comprise about or more than about 1, 2, 3, 4, 5, 6, 7, 8, 9, 10, 15, 20, or more guide sequences. In some embodiments, about or more than about 1, 2, 3, 4, 5, 6, 7, 8, 9, 10, or more such guide-sequence-containing vectors may be provided, and optionally delivered to a cell. In some embodiments, a vector comprises a regulatory element operably linked to an enzyme-coding sequence encoding a CRISPR enzyme, such as a Cas protein. CRISPR enzyme or CRISPR enzyme mRNA or CRISPR guide RNA or RNA(s) can be delivered separately; and advantageously at least one of these is delivered via a nanoparticle complex. CRISPR enzyme mRNA can be delivered prior to the guide RNA to give time for CRISPR enzyme to be expressed. CRISPR enzyme mRNA might be administered 1-12 hours (preferably around 2-6 hours) prior to the administration of guide RNA. Alternatively, CRISPR enzyme mRNA and guide RNA can be administered together. Advantageously, a second booster dose of guide RNA can be administered 1-12 hours (preferably around 2-6 hours) after the initial administration of CRISPR enzyme mRNA+guide RNA. Additional administrations of CRISPR enzyme mRNA and/or guide RNA might be useful to achieve the most efficient levels of genome modification.

[0378] In one aspect, the invention provides methods for using one or more elements of a CRISPR system. The CRISPR complex of the invention provides an effective means for modifying a target polynucleotide. The CRISPR complex of the invention has a wide variety of utility including modifying (e.g., deleting, inserting, translocating, inactivating, activating) a target polynucleotide in a multiplicity of cell types. As such the CRISPR complex of the invention has a broad spectrum of applications in, e.g., gene therapy, drug screening, disease diagnosis, and prognosis. An exemplary CRISPR complex comprises a CRISPR enzyme complexed with a guide sequence hybridized to a target sequence within the target polynucleotide. The guide sequence is linked to a tracr mate sequence, which in turn hybridizes to a tracr sequence. In one embodiment, this invention provides a method of cleaving a target polynucleotide. The method comprises modifying a target polynucleotide using a CRISPR complex that binds to the target polynucleotide and effect cleavage of said target polynucleotide. Typically, the CRISPR complex of the invention, when introduced into a cell, creates a break (e.g., a single or a double strand break) in the genome sequence. For example, the method can be used to cleave a disease gene in a cell. The break created by the CRISPR complex can be repaired by a repair processes such as the error prone non-homologous end joining (NHEJ) pathway or the high fidelity homology-directed repair (HDR). During these repair process, an exogenous polynucleotide template can be introduced into the genome sequence. In some methods, the HDR process is used modify genome sequence. For example, an exogenous polynucleotide template comprising a sequence to be integrated flanked by an upstream sequence and a downstream sequence is introduced into a cell. The upstream and downstream sequences share sequence similarity with either side of the site of integration in the chromosome. Where desired, a donor polynucleotide can be DNA, e.g., a DNA plasmid, a bacterial artificial chromosome (BAC), a yeast artificial chromosome (YAC), a viral vector, a linear piece of DNA, a PCR fragment, a naked nucleic acid, or a nucleic acid complexed with a delivery vehicle such as a liposome or poloxamer. The exogenous polynucleotide template comprises a sequence to be integrated (e.g., a mutated gene). The sequence for integration may be a sequence endogenous or exogenous to the cell. Examples of a sequence to be integrated include polynucleotides encoding a protein or a non-coding RNA (e.g., a microRNA). Thus, the sequence for integration may be operably linked to an appropriate control sequence or sequences. Alternatively, the sequence to be integrated may provide a regulatory function. The upstream and downstream sequences in the exogenous polynucleotide template are selected to promote recombination between the chromosomal sequence of interest and the donor polynucleotide. The upstream sequence is a nucleic acid sequence that shares sequence similarity with the genome sequence upstream of the targeted site for integration. Similarly, the downstream sequence is a nucleic acid sequence that shares sequence similarity with the chromosomal sequence downstream of the targeted site of integration. The upstream and downstream sequences in the exogenous polynucleotide template can have 75%, 80%, 85%, 90%, 95%, or 100% sequence identity with the targeted genome sequence. Preferably, the upstream and downstream sequences in the exogenous polynucleotide template have about 95%, 96%, 97%, 98%, 99%, or 100% sequence identity with the targeted genome sequence. In some methods, the upstream and downstream sequences in the exogenous polynucleotide template have about 99% or 100% sequence identity with the targeted genome sequence. An upstream or downstream sequence may comprise from about 20 bp to about 2500 bp, for example, about 50, 100, 200, 300, 400, 500, 600, 700, 800, 900, 1000, 1100, 1200, 1300, 1400, 1500, 1600, 1700, 1800, 1900, 2000, 2100, 2200, 2300, 2400, or 2500 bp. In some methods, the exemplary upstream or downstream sequence have about 200 bp to about 2000 bp, about 600 bp to about 1000 bp, or more particularly about 700 bp to about 1000 bp. In some methods, the exogenous polynucleotide template may further comprise a marker. Such a marker may make it easy to screen for targeted integrations. Examples of suitable markers include restriction sites, fluorescent proteins, or selectable markers. The exogenous polynucleotide template of the invention can be constructed using recombinant techniques (see, for example, Sambrook et al., 2001 and Ausubel et al., 1996). In a method for modifying a target polynucleotide by integrating an exogenous polynucleotide template, a double stranded break is introduced into the genome sequence by the CRISPR complex, the break is repaired via homologous recombination an exogenous polynucleotide template such that the template is integrated into the genome. The presence of a double-stranded break facilitates integration of the template. In other embodiments, this invention provides a method of modifying expression of a polynucleotide in a eukaryotic cell. The method comprises increasing or decreasing expression of a target polynucleotide by using a CRISPR complex that binds to the polynucleotide. In some methods, a target polynucleotide can be inactivated to effect the modification of the expression in a cell. For example, upon the binding of a CRISPR complex to a target sequence in a cell, the target polynucleotide is inactivated such that the sequence is not transcribed, the coded protein is not produced, or the sequence does not function as the wild-type sequence does. For example, a protein or microRNA coding sequence may be inactivated such that the protein or microRNA or pre-microRNA transcript is not produced. In some methods, a control sequence can be inactivated such that it no longer functions as a control sequence. As used herein, “control sequence” refers to any nucleic acid sequence that effects the transcription, translation, or accessibility of a nucleic acid sequence. Examples of a control sequence include, a promoter, a transcription terminator, and an enhancer are control sequences. The target polynucleotide of a CRISPR complex can be any polynucleotide endogenous or exogenous to the eukaryotic cell. For example, the target polynucleotide can be a polynucleotide residing in the nucleus of the eukaryotic cell. The target polynucleotide can be a sequence coding a gene product (e.g., a protein) or a non-coding sequence (e.g., a regulatory polynucleotide or a junk DNA). Examples of target polynucleotides include a sequence associated with a signaling biochemical pathway, e.g., a signaling biochemical pathway-associated gene or polynucleotide. Examples of target polynucleotides include a disease associated gene or polynucleotide. A “disease-associated” gene or polynucleotide refers to any gene or polynucleotide which is yielding transcription or translation products at an abnormal level or in an abnormal form in cells derived from a disease-affected tissues compared with tissues or cells of a non disease control. It may be a gene that becomes expressed at an abnormally high level; it may be a gene that becomes expressed at an abnormally low level, where the altered expression correlates with the occurrence and/or progression of the disease. A disease-associated gene also refers to a gene possessing mutation(s) or genetic variation that is directly responsible or is in linkage disequilibrium with a gene(s) that is responsible for the etiology of a disease. The transcribed or translated products may be known or unknown, and may be at a normal or abnormal level. The target polynucleotide of a CRISPR complex can be any polynucleotide endogenous or exogenous to the eukaryotic cell. For example, the target polynucleotide can be a polynucleotide residing in the nucleus of the eukaryotic cell. The target polynucleotide can be a sequence coding a gene product (e.g., a protein) or a non-coding sequence (e.g., a regulatory polynucleotide or a junk DNA). Without wishing to be bound by theory, it is believed that the target sequence should be associated with a PAM (protospacer adjacent motif); that is, a short sequence recognized by the CRISPR complex. The precise sequence and length requirements for the PAM differ depending on the CRISPR enzyme used, but PAMs are typically 2-5 base pair sequences adjacent the protospacer (that is, the target sequence) Examples of PAM sequences are given in the examples section below, and the skilled person will be able to identify further PAM sequences for use with a given CRISPR enzyme. In some embodiments, the method comprises allowing a CRISPR complex to bind to the target polynucleotide to effect cleavage of said target polynucleotide thereby modifying the target polynucleotide, wherein the CRISPR complex comprises a CRISPR enzyme complexed with a guide sequence hybridized to a target sequence within said target polynucleotide, wherein said guide sequence is linked to a tracr mate sequence which in turn hybridizes to a tracr sequence. In one aspect, the invention provides a method of modifying expression of a polynucleotide in a eukaryotic cell. In some embodiments, the method comprises allowing a CRISPR complex to bind to the polynucleotide such that said binding results in increased or decreased expression of said polynucleotide; wherein the CRISPR complex comprises a CRISPR enzyme complexed with a guide sequence hybridized to a target sequence within said polynucleotide, wherein said guide sequence is linked to a tracr mate sequence which in turn hybridizes to a tracr sequence. Similar considerations and conditions apply as above for methods of modifying a target polynucleotide. In fact, these sampling, culturing and re-introduction options apply across the aspects of the present invention. In one aspect, the invention provides for methods of modifying a target polynucleotide in a eukaryotic cell, which may be in vivo, ex vivo or in vitro. In some embodiments, the method comprises sampling a cell or population of cells from a human or non-human animal, and modifying the cell or cells. Culturing may occur at any stage ex vivo. The cell or cells may even be re-introduced into the non-human animal or plant. For re-introduced cells it is particularly preferred that the cells are stem cells.

[0379] Indeed, in any aspect of the invention, the CRISPR complex may comprise a CRISPR enzyme complexed with a guide sequence hybridized to a target sequence, wherein said guide sequence may be linked to a tracr mate sequence which in turn may hybridize to a tracr sequence.

[0380] The invention relates to the engineering and optimization of systems, methods and compositions used for the control of gene expression involving sequence targeting, such as genome perturbation or gene-editing, that relate to the CRISPR-Cas system and components thereof. In advantageous embodiments, the Cas enzyme is Cas9. An advantage of the present methods is that the CRISPR system minimizes or avoids off-target binding and its resulting side effects. This is achieved using systems arranged to have a high degree of sequence specificity for the target DNA.

### Cas9

[0381] Cas9 optimization may be used to enhance function or to develop new functions, one can generate chimeric Cas9 proteins, as demonstrated in the Examples. Chimeric Cas9 proteins can be made by combining fragments from different Cas9 homologs. For example, two example chimeric Cas9 proteins from the Cas9s described herein. For example, Applicants fused the N-term of St1Cas9 (fragment from this protein is in bold) with C-term of SpCas9. The benefit of making chimeric Cas9s include any or all of: reduced toxicity; improved expression in eukaryotic cells; enhanced specificity; reduced molecular weight of protein, for example, making the protein smaller by combining the smallest domains from different Cas9 homologs; and/or altering the PAM sequence requirement.

[0382] The Cas9 may be used as a generic DNA binding protein as demonstrated in the Examples. Applicants used Cas9 as a generic DNA binding protein by mutating the two catalytic domains (D10 and H840) responsible for cleaving both strands of the DNA target. In order to upregulate gene transcription at a target locus Applicants fused a transcriptional activation domain (VP64) to Cas9. Other transcriptional activation domains are known. As shown in the Examples transcriptional activation is possible as well as gene repression using a Cas9 repressor (DNA-binding domain) that binds to the target gene sequence, thus repressing its activity.

[0383] Cas9 and one or more guide RNA can be delivered using adeno associated virus (AAV), lentivirus, adenovirus or other plasmid or viral vector types, in particular, using formulations and doses from, for example, U.S. Pat. Nos. 8,454,972 (formulations, doses for adenovirus), U.S. Pat. No. 8,404,658 (formulations, doses for AAV) and U.S. Pat. No. 5,846,946 (formulations, doses for DNA plasmids) and from clinical trials and publications regarding the clinical trials involving lentivirus, AAV and adenovirus. For examples, for AAV, the route of administration, formulation and dose can be as in U.S. Pat. No. 8,454,972 and as in clinical trials involving AAV. For Adenovirus, the route of administration, formulation and dose can be as in U.S. Pat. No. 8,404,658 and as in clinical trials involving adenovirus. For plasmid delivery, the route of administration, formulation and dose can be as in U.S. Pat. No. 5,846,946 and as in clinical studies involving plasmids. Doses may be based on or extrapolated to an average 70 kg individual (e.g. a male adult human), and can be adjusted for patients, subjects, mammals of different weight and species. Frequency of administration is within the ambit of the medical or veterinary practitioner (e.g., physician, veterinarian), depending on usual factors including the age, sex, general health, other conditions of the patient or subject and the particular condition or symptoms being addressed.

[0384] The viral vectors can be injected into the tissue of interest. For cell-type specific genome modification, the expression of Cas9 can be driven by a cell-type specific promoter. For example, liver-specific expression might use the Albumin promoter whereas neuron-specific expression (for viruses which may be latent in the brain) might use the Synapsin I promoter.

### Transgenic Animals and Plants

[0385] Transgenic animals are also provided. Preferred examples include animals comprising Cas9, in terms of polynucleotides encoding Cas9 or the protein itself. Mice, rats and rabbits are preferred. To generate transgenic mice with the constructs, as exemplified herein one may inject pure, linear DNA into the pronucleus of a zygote from a pseudo pregnant female, e.g. a CB56 female. Founders may then be identified, genotyped, and backcrossed to CB57 mice. The constructs may then be cloned and optionally verified, for instance by Sanger sequencing. Knock outs are envisaged where for instance one or more genes are knocked out in a model. However, are knockins are also envisaged (alone or in combination). An example knockin Cas9 mouse was generated and this is exemplified, but Cas9 knockins are preferred. To generate a Cas9 knock in mice one may target the same constitutive and conditional constructs to the Rosa26 locus, as described herein (FIGS. 25A-B and 26). Methods of US Patent Publication Nos. 20120017290 and 20110265198 assigned to Sangamo BioSciences, Inc. directed to targeting the Rosa locus may be modified to utilize the CRISPR Cas system of the present invention. In another embodiment, the methods of US Patent Publication No. 20130236946 assigned to Cellectis directed to targeting the Rosa locus may also be modified to utilize the CRISPR Cas system of the present invention.

[0386] Utility of the conditional Cas9 mouse: Applicants have shown in 293 cells that the Cas9 conditional expression construct can be activated by co-expression with Cre. Applicants also show that the correctly targeted R1 mESCs can have active Cas9 when Cre is expressed. Because Cas9 is followed by the P2A peptide cleavage sequence and then EGFP Applicants identify successful expression by observing EGFP. Applicants have shown Cas9 activation in mESCs. This same concept is what makes the conditional Cas9 mouse so useful. Applicants may cross their conditional Cas9 mouse with a mouse that ubiquitously expresses Cre (ACTB-Cre line) and may arrive at a mouse that expresses Cas9 in every cell. It should only take the delivery of chimeric RNA to induce genome editing in embryonic or adult mice. Interestingly, if the conditional Cas9 mouse is crossed with a mouse expressing Cre under a tissue specific promoter, there should only be Cas9 in the tissues that also express Cre. This approach may be used to edit the genome in only precise tissues by delivering chimeric RNA to the same tissue.

### Delivery Generally

[0387] Vector delivery, e.g., plasmid, viral delivery: The CRISPR enzyme, for instance a Cas9, and/or any of the present RNAs, for instance a guide RNA, can be delivered using any suitable vector, e.g., plasmid or viral vectors, such as adeno associated virus (AAV), lentivirus, adenovirus or other viral vector types, or combinations thereof. Cas9 and one or more guide RNAs can be packaged into one or more vectors, e.g., plasmid or viral vectors. In some embodiments, the vector, e.g., plasmid or viral vector is delivered to the tissue of interest by, for example, an intramuscular injection, while other times the delivery is via intravenous, transdermal, intranasal, oral, mucosal, or other delivery methods. Such delivery may be either via a single dose, or multiple doses. One skilled in the art understands that the actual dosage to be delivered herein may vary greatly depending upon a variety of factors, such as the vector choice, the target cell, organism, or tissue, the general condition of the subject to be treated, the degree of transformation/modification sought, the administration route, the administration mode, the type of transformation/modification sought, etc.

[0388] Such a dosage may further contain, for example, a carrier (water, saline, ethanol, glycerol, lactose, sucrose, calcium phosphate, gelatin, dextran, agar, pectin, peanut oil, sesame oil, etc.), a diluent, a pharmaceutically-acceptable carrier (e.g., phosphate-buffered saline), a pharmaceutically-acceptable excipient, and/or other compounds known in the art. The dosage may further contain one or more pharmaceutically acceptable salts such as, for example, a mineral acid salt such as a hydrochloride, a hydrobromide, a phosphate, a sulfate, etc.; and the salts of organic acids such as acetates, propionates, malonates, benzoates, etc. Additionally, auxiliary substances, such as wetting or emulsifying agents, pH buffering substances, gels or gelling materials, flavorings, colorants, microspheres, polymers, suspension agents, etc. may also be present herein. In addition, one or more other conventional pharmaceutical ingredients, such as preservatives, humectants, suspending agents, surfactants, antioxidants, anticaking agents, fillers, chelating agents, coating agents, chemical stabilizers, etc. may also be present, especially if the dosage form is a reconstitutable form. Suitable exemplary ingredients include microcrystalline cellulose, carboxymethylcellulose sodium, polysorbate 80, phenylethyl alcohol, chlorobutanol, potassium sorbate, sorbic acid, sulfur dioxide, propyl gallate, the parabens, ethyl vanillin, glycerin, phenol, parachlorophenol, gelatin, albumin and a combination thereof. A thorough discussion of pharmaceutically acceptable excipients is available in REMINGTON'S PHARMACEUTICAL SCIENCES (Mack Pub. Co., N.J. 1991) which is incorporated by reference herein.

[0389] In an embodiment herein the delivery is via an adenovirus, which may be at a single booster dose containing at least 1×10⁵ particles (also referred to as particle units, pu) of adenoviral vector. In an embodiment herein, the dose preferably is at least about 1×10⁶ particles (for example, about 1×10⁶-1×10¹² particles), more preferably at least about 1×10⁷ particles, more preferably at least about 1×10⁸ particles (e.g., about 1×10⁸-1×10¹¹ particles or about 1×10⁸-1×10¹² particles), and most preferably at least about 1×10⁰ particles (e.g., about 1×10⁹-1×10¹⁰ particles or about 1×10⁹-1×10¹² particles), or even at least about 1×10¹⁰ particles (e.g., about 1×10¹⁰-1×10¹² particles) of the adenoviral vector. Alternatively, the dose comprises no more than about 1×10¹⁴ particles, preferably no more than about 1×10¹³ particles, even more preferably no more than about 1×10¹² particles, even more preferably no more than about 1×10¹¹ particles, and most preferably no more than about 1×10¹⁰ particles (e.g., no more than about 1×10⁹ articles). Thus, the dose may contain a single dose of adenoviral vector with, for example, about 1×10⁶ particle units (pu), about 2×10⁶ pu, about 4×10⁶ pu, about 1×10⁷ pu, about 2×10⁷ pu, about 4×10⁷ pu, about 1×10⁸ pu, about 2×10⁸ pu, about 4×10⁸ pu, about 1×10⁹ pu, about 2×10⁹ pu, about 4×10⁹ pu, about 1×10¹⁰ pu, about 2×10¹⁰ pu, about 4×10¹⁰ pu, about 1×10¹¹ pu, about 2×10¹¹ pu, about 4×10¹¹ pu, about 1×10¹² pu, about 2×10¹² pu, or about 4×10¹² pu of adenoviral vector. See, for example, the adenoviral vectors in U.S. Pat. No. 8,454,972 B2 to Nabel, et. al., granted on Jun. 4, 2013; incorporated by reference herein, and the dosages at col 29, lines 36-58 thereof. In an embodiment herein, the adenovirus is delivered via multiple doses.

[0390] In an embodiment herein, the delivery is via an AAV. A therapeutically effective dosage for in vivo delivery of the AAV to a human is believed to be in the range of from about 20 to about 50 ml of saline solution containing from about 1×10¹⁰ to about 1×10¹⁰ functional AAV/ml solution. The dosage may be adjusted to balance the therapeutic benefit against any side effects. In an embodiment herein, the AAV dose is generally in the range of concentrations of from about 1×10⁵ to 1×10⁵⁰ genomes AAV, from about 1×10⁸ to 1×10²⁰ genomes AAV, from about 1×10¹⁰ to about 1×10¹⁶ genomes, or about 1×10¹¹ to about 1×10¹⁶ genomes AAV. A human dosage may be about 1×10¹³ genomes AAV. Such concentrations may be delivered in from about 0.001 ml to about 100 ml, about 0.05 to about 50 ml, or about 10 to about 25 ml of a carrier solution. Other effective dosages can be readily established by one of ordinary skill in the art through routine trials establishing dose response curves. See, for example, U.S. Pat. No. 8,404,658 B2 to Hajjar, et al., granted on Mar. 26, 2013, at col. 27, lines 45-60.

[0391] In an embodiment herein the delivery is via a plasmid. In such plasmid compositions, the dosage should be a sufficient amount of plasmid to elicit a response. For instance, suitable quantities of plasmid DNA in plasmid compositions can be from about 0.1 to about 2 mg, or from about 1 μg to about 10 μg per 70 kg individual. Plasmids of the invention will generally comprise (i) a promoter; (ii) a sequence encoding a CRISPR enzyme, operably linked to said promoter; (iii) a selectable marker; (iv) an origin of replication; and (v) a transcription terminator downstream of and operably linked to (ii). The plasmid can also encode the RNA components of a CRISPR complex, but one or more of these may instead be encoded on a different vector.

[0392] The doses herein are based on an average 70 kg individual. The frequency of administration is within the ambit of the medical or veterinary practitioner (e.g., physician, veterinarian), or scientist skilled in the art. It is also noted that mice used in experiments are typically about 20 g and from mice experiments one can scale up to a 70 kg individual.

[0393] In some embodiments the RNA molecules of the invention are delivered in liposome or lipofectin formulations and the like and can be prepared by methods well known to those skilled in the art. Such methods are described, for example, in U.S. Pat. Nos. 5,593,972, 5,589,466, and 5,580,859, which are herein incorporated by reference. Delivery systems aimed specifically at the enhanced and improved delivery of siRNA into mammalian cells have been developed, (see, for example, Shen et al FEBS Let. 2003, 539:111-114; Xia et al., Nat. Biotech. 2002, 20:1006-1010; Reich et al., Mol. Vision. 2003, 9:210-216; Sorensen et al., J. Mol. Biol. 2003, 327:761-766; Lewis et al., Nat. Gen. 2002, 32:107-108 and Simeoni et al., NAR 2003, 31, 11:2717-2724) and may be applied to the present invention. siRNA has recently been successfully used for inhibition of gene expression in primates (see for example. Tolentino et al., Retina 24 (4): 660 which may also be applied to the present invention.

[0394] Indeed, RNA delivery is a useful method of in vivo delivery. It is possible to deliver Cas9 and gRNA (and, for instance, HR repair template) into cells using liposomes or nanoparticles. Thus delivery of the CRISPR enzyme, such as a Cas9 and/or delivery of the RNAs of the invention may be in RNA form and via microvesicles, liposomes or nanoparticles. For example, Cas9 mRNA and gRNA can be packaged into liposomal particles for delivery in vivo. Liposomal transfection reagents such as lipofectamine from Life Technologies and other reagents on the market can effectively deliver RNA molecules into the liver.

[0395] Means of delivery of RNA also preferred include delivery of RNA via nanoparticles (Cho, S., Goldberg, M., Son, S., Xu, Q., Yang, F., Mei, Y., Bogatyrev, S., Langer, R. and Anderson, D., Lipid-like nanoparticles for small interfering RNA delivery to endothelial cells, Advanced Functional Materials, 19:3112-3118, 2010) or exosomes (Schroeder, A., Levins, C., Cortez, C., Langer, R., and Anderson, D., Lipid-based nanotherapeutics for siRNA delivery, Journal of Internal Medicine, 267:9-21, 2010, PMID: 20059641). Indeed, exosomes have been shown to be particularly useful in delivery siRNA, a system with some parallels to the CRISPR system. For instance, El-Andaloussi S, et al. (“Exosome-mediated delivery of siRNA in vitro and in vivo.” Nat Protoc. 2012 December; 7 (12): 2112-26. doi: 10.1038/nprot.2012.131. Epub 2012 Nov. 15.) describe how exosomes are promising tools for drug delivery across different biological barriers and can be harnessed for delivery of siRNA in vitro and in vivo. Their approach is to generate targeted exosomes through transfection of an expression vector, comprising an exosomal protein fused with a peptide ligand. The exosomes are then purify and characterized from transfected cell supernatant, then RNA is loaded into the exosomes. Delivery or administration according to the invention can be performed with exosomes, in particular but not limited to the brain. Vitamin E (α-tocopherol) may be conjugated with CRISPR Cas and delivered to the brain along with high density lipoprotein (HDL), for example in a similar manner as was done by Uno et al. (HUMAN GENE THERAPY 22:711-719 (June 2011)) for delivering short-interfering RNA (siRNA) to the brain. Mice were infused via Osmotic minipumps (model 1007D; Alzet, Cupertino, CA) filled with phosphate-buffered saline (PBS) or free TocsiBACE or Toc-siBACE/HDL and connected with Brain Infusion Kit 3 (Alzet). A brain-infusion cannula was placed about 0.5 mm posterior to the bregma at midline for infusion into the dorsal third ventricle. Uno et al. found that as little as 3 nmol of Toc-siRNA with HDL could induce a target reduction in comparable degree by the same ICV infusion method. A similar dosage of CRISPR Cas conjugated to α-tocopherol and co-administered with HDL targeted to the brain may be contemplated for humans in the present invention, for example, about 3 nmol to about 3 μmol of CRISPR Cas targeted to the brain may be contemplated. Zou et al. ((HUMAN GENE THERAPY 22:465-475 (April 2011)) describes a method of lentiviral-mediated delivery of short-hairpin RNAs targeting PKCγ for in vivo gene silencing in the spinal cord of rats. Zou et al. administered about 10 μl of a recombinant lentivirus having a titer of 1×10⁹ transducing units (TU)/ml by an intrathecal catheter. A similar dosage of CRISPR Cas expressed in a lentiviral vector targeted to the brain may be contemplated for humans in the present invention, for example, about 10-50 ml of CRISPR Cas targeted to the brain in a lentivirus having a titer of 1×10⁹ transducing units (TU)/ml may be contemplated.

[0396] In terms of local delivery to the brain, this can be achieved in various ways. For instance, material can be delivered intrastriatally e.g. by injection. Injection can be performed stereotactically via a craniotomy.

[0397] Enhancing NHEJ or HR efficiency is also helpful for delivery. It is preferred that NHEJ efficiency is enhanced by co-expressing end-processing enzymes such as Trex2 (Dumitrache et al. Genetics. 2011 August; 188 (4): 787-797). It is preferred that HR efficiency is increased by transiently inhibiting NHEJ machineries such as Ku70 and Ku86. HR efficiency can also be increased by co-expressing prokaryotic or eukaryotic homologous recombination enzymes such as RecBCD, RecA.

### Packaging and Promoters Generally

[0398] Ways to package Cas9 coding nucleic acid molecules, e.g., DNA, into vectors, e.g., viral vectors, to mediate genome modification in vivo include:
[0399] To achieve NHEJ-mediated gene knockout:
   [0400] Single virus vector:
   [0401] Vector containing two or more expression cassettes:
   [0402] Promoter-Cas9 coding nucleic acid molecule-terminator
   [0403] Promoter-gRNA1-terminator
   [0404] Promoter-gRNA2-terminator
   [0405] Promoter-gRNA (N)-terminator (up to size limit of vector)
[0406] Double virus vector:
   [0407] Vector 1 containing one expression cassette for driving the expression of Cas9
   [0408] Promoter-Cas9 coding nucleic acid molecule-terminator
   [0409] Vector 2 containing one more expression cassettes for driving the expression of one or more guideRNAs
[0410] Promoter-gRNA1-terminator
[0411] Promoter-gRNA (N)-terminator (up to size limit of vector)
[0412] To mediate homology-directed repair.

[0413] In addition to the single and double virus vector approaches described above, an additional vector is used to deliver a homology-direct repair template.

[0414] The promoter used to drive Cas9 coding nucleic acid molecule expression can include:
[0415] AAV ITR can serve as a promoter: this is advantageous for eliminating the need for an additional promoter element (which can take up space in the vector). The additional space freed up can be used to drive the expression of additional elements (gRNA, etc.). Also, ITR activity is relatively weaker, so can be used to reduce potential toxicity due to over expression of Cas9.
[0416] For ubiquitous expression, can use promoters: CMV, CAG, CBh, PGK, SV40, Ferritin heavy or light chains, etc.
[0417] For brain or other CNS expression, can use promoters: SynapsinI for all neurons, CaMKIIalpha for excitatory neurons, GAD67 or GAD65 or VGAT for GABAergic neurons, etc.
[0418] For liver expression, can use Albumin promoter.
[0419] For lung expression, can use SP-B.
[0420] For endothelial cells, can use ICAM.
[0421] For hematopoietic cells can use IFNbeta or CD45.
[0422] For Osteoblasts can use OG-2.

[0423] The promoter used to drive guide RNA can include:
[0424] Pol III promoters such as U6 or H1
[0425] Use of Pol II promoter and intronic cassettes to express gRNA

### Adeno Associated Virus (AAV)

[0426] Cas9 and one or more guide RNA can be delivered using adeno associated virus (AAV), lentivirus, adenovirus or other plasmid or viral vector types, in particular, using formulations and doses from, for example, U.S. Pat. Nos. 8,454,972 (formulations, doses for adenovirus), U.S. Pat. No. 8,404,658 (formulations, doses for AAV) and U.S. Pat. No. 5,846,946 (formulations, doses for DNA plasmids) and from clinical trials and publications regarding the clinical trials involving lentivirus, AAV and adenovirus. For examples, for AAV, the route of administration, formulation and dose can be as in U.S. Pat. No. 8,454,972 and as in clinical trials involving AAV. For Adenovirus, the route of administration, formulation and dose can be as in U.S. Pat. No. 8,404,658 and as in clinical trials involving adenovirus. For plasmid delivery, the route of administration, formulation and dose can be as in U.S. Pat. No. 5,846,946 and as in clinical studies involving plasmids. Doses may be based on or extrapolated to an average 70 kg individual (e.g. a male adult human), and can be adjusted for patients, subjects, mammals of different weight and species. Frequency of administration is within the ambit of the medical or veterinary practitioner (e.g., physician, veterinarian), depending on usual factors including the age, sex, general health, other conditions of the patient or subject and the particular condition or symptoms being addressed. The viral vectors can be injected into the tissue of interest. For cell-type specific genome modification, the expression of Cas9 can be driven by a cell-type specific promoter. For example, liver-specific expression might use the Albumin promoter and neuron-specific expression (e.g. for targeting CNS disorders) might use the Synapsin I promoter.

[0427] In terms of in vivo delivery, AAV is advantageous over other viral vectors for a couple of reasons:
[0428] Low toxicity (this may be due to the purification method not requiring ultra centrifugation of cell particles that can activate the immune response)
[0429] Low probability of causing insertional mutagenesis because it doesn't integrate into the host genome.

[0430] AAV has a packaging limit of 4.5 or 4.75 Kb. This means that Cas9 as well as a promoter and transcription terminator have to be all fit into the same viral vector. Constructs larger than 4.5 or 4.75 Kb will lead to significantly reduced virus production. SpCas9 is quite large, the gene itself is over 4.1 Kb, which makes it difficult for packing into AAV. Therefore embodiments of the invention include utilizing homologs of Cas9 that are shorter. For example:

TABLE 1

| Species | Cas9 Size |
|---|---|
| Corynebacter diphtheriae | 3252 |
| Eubacterium ventriosum | 3321 |
| Streptococcus pasteurianus | 3390 |
| Lactobacillus farciminis | 3378 |
| Sphaerochaeta globus | 3537 |
| Azospirillum B510 | 3504 |
| Gluconacetobacter diazotrophicus | 3150 |
| Neisseria cinerea | 3246 |
| Roseburia intestinalis | 3420 |
| Parvibaculum lavamentivorans | 3111 |
| Staphylococcus aureus | 3159 |
| Nitratifractor salsuginis DSM 16511 | 3396 |
| Campylobacter lari CF89-12 | 3009 |
| Streptococcus thermophilus LMD-9 | 3396 |

[0431] These species are therefore, in general, preferred Cas9 species.

[0432] As to AAV, the AAV can be AAV1, AAV2, AAV5 or any combination thereof. One can select the AAV of the AAV with regard to the cells to be targeted; e.g., one can select AAV serotypes 1, 2, 5 or a hybrid capsid AAV1, AAV2, AAV5 or any combination thereof for targeting brain or neuronal cells; and one can select AAV4 for targeting cardiac tissue. AAV8 is useful for delivery to the liver. The herein promoters and vectors are preferred individually. A tabulation of certain AAV serotypes as to these cells (see Grimm, D. et al, J. Virol. 82:5887-5911 (2008)) is as follows:

TABLE 2

| | AAV- | AAV- | AAV- | AAV- | AAV- | AAV- | AAV- | AAV- |
|---|---|---|---|---|---|---|---|---|
| Cell Line | 1 | 2 | 3 | 4 | 5 | 6 | 8 | 9 |
| Huh-7 | 13 | 100 | 2.5 | 0.0 | 0.1 | 10 | 0.7 | 0.0 |
| HEK293 | 25 | 100 | 2.5 | 0.1 | 0.1 | 5 | 0.7 | 0.1 |
| HeLa | 3 | 100 | 2.0 | 0.1 | 6.7 | 1 | 0.2 | 0.1 |
| HepG2 | 3 | 100 | 16.7 | 0.3 | 1.7 | 5 | 0.3 | ND |
| Hep1A | 20 | 100 | 0.2 | 1.0 | 0.1 | 1 | 0.2 | 0.0 |
| 911 | 17 | 100 | 11 | 0.2 | 0.1 | 17 | 0.1 | ND |
| CHO | 100 | 100 | 14 | 1.4 | 333 | 50 | 10 | 1.0 |
| COS | 33 | 100 | 33 | 3.3 | 5.0 | 14 | 2.0 | 0.5 |
| MeWo | 10 | 100 | 20 | 0.3 | 6.7 | 10 | 1.0 | 0.2 |
| NIH3T3 | 10 | 100 | 2.9 | 2.9 | 0.3 | 10 | 0.3 | ND |
| A549 | 14 | 100 | 20 | ND | 0.5 | 10 | 0.5 | 0.1 |
| HT1180 | 20 | 100 | 10 | 0.1 | 0.3 | 33 | 0.5 | 0.1 |
| Monocytes | 1111 | 100 | ND | ND | 125 | 1429 | ND | ND |
| Immature DC | 2500 | 100 | ND | ND | 222 | 2857 | ND | ND |
| Mature DC | 2222 | 100 | ND | ND | 333 | 3333 | ND | ND |

### Lentivirus

[0433] Lentiviruses are complex retroviruses that have the ability to infect and express their genes in both mitotic and post-mitotic cells. The most commonly known lentivirus is the human immunodeficiency virus (HIV), which uses the envelope glycoproteins of other viruses to target a broad range of cell types.

[0434] Lentiviruses may be prepared as follows. After cloning pCasES10 (which contains a lentiviral transfer plasmid backbone), HEK293FT at low passage (p=5) were seeded in a T-75 flask to 50% confluence the day before transfection in DMEM with 10% fetal bovine serum and without antibiotics. After 20 hours, media was changed to OptiMEM (serum-free) media and transfection was done 4 hours later. Cells were transfected with 10 μg of lentiviral transfer plasmid (pCasES10) and the following packaging plasmids: 5 μg of pMD2.G (VSV-g pseudotype), and 7.5 μg of psPAX2 (gag/pol/rev/tat). Transfection was done in 4 mL OptiMEM with a cationic lipid delivery agent (50 uL Lipofectamine 2000 and 100 ul Plus reagent). After 6 hours, the media was changed to antibiotic-free DMEM with 10% fetal bovine serum. These methods use serum during cell culture, but serum-free methods are preferred.

[0435] Lentivirus may be purified as follows. Viral supernatants were harvested after 48 hours. Supernatants were first cleared of debris and filtered through a 0.45 um low protein binding (PVDF) filter. They were then spun in a ultracentrifuge for 2 hours at 24,000 rpm. Viral pellets were resuspended in 50 ul of DMEM overnight at 4 C. They were then aliquotted and immediately frozen at −80° C.

[0436] In another embodiment, minimal non-primate lentiviral vectors based on the equine infectious anemia virus (EIAV) are also contemplated, especially for ocular gene therapy (see, e.g., Balagaan, J Gene Med 2006; 8:275-285). In another embodiment, RetinoStat®, an equine infectious anemia virus-based lentiviral gene therapy vector that expresses angiostatic proteins endostatin and angiostatin that is delivered via a subretinal injection for the treatment of the web form of age-related macular degeneration is also contemplated (see, e.g., Binley et al., HUMAN GENE THERAPY 23:980-991 (September 2012)) and this vector may be modified for the CRISPR-Cas system of the present invention.

[0437] In another embodiment, self-inactivating lentiviral vectors with an siRNA targeting a common exon shared by HIV tat/rev, a nucleolar-localizing TAR decoy, and an anti-CCR5-specific hammerhead ribozyme (see, e.g., DiGiusto et al. (2010) Sci Transl Med 2: 36ra43) may be used/and or adapted to the CRISPR-Cas system of the present invention. A minimum of 2.5×10⁶ CD34+ cells per kilogram patient weight may be collected and prestimulated for 16 to 20 hours in X-VIVO 15 medium (Lonza) containing 2 μmol/L-glutamine, stem cell factor (100 ng/ml), Flt-3 ligand (Flt-3L) (100 ng/ml), and thrombopoietin (10 ng/ml) (CellGenix) at a density of 2×10⁶ cells/ml. Prestimulated cells may be transduced with lentiviral at a multiplicity of infection of 5 for 16 to 24 hours in 75-cm² tissue culture flasks coated with fibronectin (25 mg/cm²) (RetroNectin, Takara Bio Inc.).

[0438] Lentiviral vectors have been disclosed as in the treatment for Parkinson's Disease, see, e.g., US Patent Publication No. 20120295960 and U.S. Pat. Nos. 7,303,910 and 7,351,585. Lentiviral vectors have also been disclosed for the treatment of ocular diseases, see e.g., US Patent Publication Nos. 20060281180, 20090007284, US20110117189; US20090017543; US20070054961, US20100317109. Lentiviral vectors have also been disclosed for delivery to the brain, see, e.g., US Patent Publication Nos. US20110293571; US20110293571, US20040013648, US20070025970, US20090111106 and U.S. Pat. No. 7,259,015.

### RNA Delivery

[0439] RNA delivery: The CRISPR enzyme, for instance a Cas9, and/or any of the present RNAs, for instance a guide RNA, can also be delivered in the form of RNA. Cas9 mRNA can be generated using in vitro transcription. For example, Cas9 mRNA can be synthesized using a PCR cassette containing the following elements: T7_promoter-kozak sequence (GCCACC)-Cas9-3′ UTR from beta globin-polyA tail (a string of 120 or more adenines). The cassette can be used for transcription by T7 polymerase. Guide RNAs can also be transcribed using in vitro transcription from a cassette containing T7_promoter-GG-guide RNA sequence.

[0440] To enhance expression and reduce possible toxicity, the CRISPR enzyme-coding sequence and/or the guide RNA can be modified to include one or more modified nucleoside e.g. using pseudo-U or 5-Methyl-C.

[0441] mRNA delivery methods are especially promising for liver delivery currently.

[0442] Much clinical work on RNA delivery has focused on RNAi or antisense, but these systems can be adapted for delivery of RNA for implementing the present invention. References below to RNAi etc. should be read accordingly.

### Nanoparticles

[0443] CRISPR enzyme mRNA and guide RNA may be delivered simultaneously using nanoparticles or lipid envelopes. For example, Su X, Fricke J, Kavanagh D G, Irvine D J (“In vitro and in vivo mRNA delivery using lipid-enveloped pH-responsive polymer nanoparticles” Mol Pharm. 2011 Jun. 6; 8 (3): 774-87. doi: 10.1021/mp100390w. Epub 2011 Apr. 1) describes biodegradable core-shell structured nanoparticles with a poly(β-amino ester) (PBAE) core enveloped by a phospholipid bilayer shell. These were developed for in vivo mRNA delivery. The pH-responsive PBAE component was chosen to promote endosome disruption, while the lipid surface layer was selected to minimize toxicity of the polycation core. Such are, therefore, preferred for delivering RNA of the present invention.

[0444] In one embodiment, nanoparticles based on self assembling bioadhesive polymers are contemplated, which may be applied to oral delivery of peptides, intravenous delivery of peptides and nasal delivery of peptides, all to the brain. Other embodiments, such as oral absorption and ocular delivery of hydrophobic drugs are also contemplated. The molecular envelope technology involves an engineered polymer envelope which is protected and delivered to the site of the disease (see, e.g., Mazza, M. et al. ACSNano, 2013. 7 (2): 1016-1026; Siew, A., et al. Mol Pharm, 2012. 9 (1): 14-28; Lalatsa, A., et al. J Contr Rel, 2012. 161 (2): 523-36; Lalatsa, A., et al., Mol Pharm, 2012. 9 (6): 1665-80; Lalatsa, A., et al. Mol Pharm, 2012. 9 (6): 1764-74; Garrett, N. L., et al. J Biophotonics, 2012. 5 (5-6): 458-68; Garrett, N. L., et al. J Raman Spect, 2012. 43 (5): 681-688; Ahmad, S., et al. J Royal Soc Interface 2010. 7: S423-33; Uchegbu, I. F. Expert Opin Drug Deliv, 2006. 3 (5): 629-40; Qu, X., et al. Biomacromolecules, 2006. 7 (12): 3452-9 and Uchegbu, I. F., et al. Int J Pharm, 2001. 224:185-199). Doses of about 5 mg/kg are contemplated, with single or multiple doses, depending on the target tissue.

[0445] In one embodiment, nanoparticles that can deliver RNA to a cancer cell to stop tumor growth developed by Dan Anderson's lab at MIT may be used/and or adapted to the CRISPR Cas system of the present invention. In particular, the Anderson lab developed fully automated, combinatorial systems for the synthesis, purification, characterization, and formulation of new biomaterials and nanoformulations. See, e.g., Alabi et al., Proc Natl Acad Sci USA. 2013 Aug. 6; 110 (32): 12881-6; Zhang et al., Adv Mater. 2013 Sep. 6; 25 (33): 4641-5; Jiang et al., Nano Lett. 2013 Mar. 13; 13 (3): 1059-64; Karagiannis et al., ACS Nano. 2012 Oct. 23; 6 (10): 8484-7; Whitehead et al., ACS Nano. 2012 Aug. 28; 6 (8): 6922-9 and Lee et al., Nat Nanotechnol. 2012 Jun. 3; 7 (6): 389-93. U.S. patent application No. 20110293703 relates to lipidoid compounds are also particularly useful in the administration of polynucleotides, which may be applied to deliver the CRISPR Cas system of the present invention. In one aspect, the aminoalcohol lipidoid compounds are combined with an agent to be delivered to a cell or a subject to form microparticles, nanoparticles, liposomes, or micelles. The agent to be delivered by the particles, liposomes, or micelles may be in the form of a gas, liquid, or solid, and the agent may be a polynucleotide, protein, peptide, or small molecule. The minoalcohol lipidoid compounds may be combined with other aminoalcohol lipidoid compounds, polymers (synthetic or natural), surfactants, cholesterol, carbohydrates, proteins, lipids, etc. to form the particles. These particles may then optionally be combined with a pharmaceutical excipient to form a pharmaceutical composition. US Patent Publication No. 20110293703 also provides methods of preparing the aminoalcohol lipidoid compounds. One or more equivalents of an amine are allowed to react with one or more equivalents of an epoxide-terminated compound under suitable conditions to form an aminoalcohol lipidoid compound of the present invention. In certain embodiments, all the amino groups of the amine are fully reacted with the epoxide-terminated compound to form tertiary amines. In other embodiments, all the amino groups of the amine are not fully reacted with the epoxide-terminated compound to form tertiary amines thereby resulting in primary or secondary amines in the aminoalcohol lipidoid compound. These primary or secondary amines are left as is or may be reacted with another electrophile such as a different epoxide-terminated compound. As will be appreciated by one skilled in the art, reacting an amine with less than excess of epoxide-terminated compound will result in a plurality of different aminoalcohol lipidoid compounds with various numbers of tails. Certain amines may be fully functionalized with two epoxide-derived compound tails while other molecules will not be completely functionalized with epoxide-derived compound tails. For example, a diamine or polyamine may include one, two, three, or four epoxide-derived compound tails off the various amino moieties of the molecule resulting in primary, secondary, and tertiary amines. In certain embodiments, all the amino groups are not fully functionalized. In certain embodiments, two of the same types of epoxide-terminated compounds are used. In other embodiments, two or more different epoxide-terminated compounds are used. The synthesis of the aminoalcohol lipidoid compounds is performed with or without solvent, and the synthesis may be performed at higher temperatures ranging from 30.-100 C., preferably at approximately 50.-90 C. The prepared aminoalcohol lipidoid compounds may be optionally purified. For example, the mixture of aminoalcohol lipidoid compounds may be purified to yield an aminoalcohol lipidoid compound with a particular number of epoxide-derived compound tails. Or the mixture may be purified to yield a particular stereo- or regioisomer. The aminoalcohol lipidoid compounds may also be alkylated using an alkyl halide (e.g., methyl iodide) or other alkylating agent, and/or they may be acylated. US Patent Publication No. 20110293703 also provides libraries of aminoalcohol lipidoid compounds prepared by the inventive methods. These aminoalcohol lipidoid compounds may be prepared and/or screened using high-throughput techniques involving liquid handlers, robots, microtiter plates, computers, etc. In certain embodiments, the aminoalcohol lipidoid compounds are screened for their ability to transfect polynucleotides or other agents (e.g., proteins, peptides, small molecules) into the cell. US Patent Publication No. 20130302401 relates to a class of poly(beta-amino alcohols) (PBAAs) has been prepared using combinatorial polymerization. The inventive PBAAs may be used in biotechnology and biomedical applications as coatings (such as coatings of films or multilayer films for medical devices or implants), additives, materials, excipients, non-biofouling agents, micropatterning agents, and cellular encapsulation agents. When used as surface coatings, these PBAAs elicited different levels of inflammation, both in vitro and in vivo, depending on their chemical structures. The large chemical diversity of this class of materials allowed us to identify polymer coatings that inhibit macrophage activation in vitro. Furthermore, these coatings reduce the recruitment of inflammatory cells, and reduce fibrosis, following the subcutaneous implantation of carboxylated polystyrene microparticles. These polymers may be used to form polyelectrolyte complex capsules for cell encapsulation. The invention may also have many other biological applications such as antimicrobial coatings, DNA or siRNA delivery, and stem cell tissue engineering. The teachings of US Patent Publication No. 20130302401 may be applied to the CRISPR Cas system of the present invention.

[0446] In another embodiment, lipid nanoparticles (LNPs) are contemplated. In particular, an antitransthyretin small interfering RNA encapsulated in lipid nanoparticles (see, e.g., Coelho et al., N Engl J Med 2013; 369:819-29) may be applied to the CRISPR Cas system of the present invention. Doses of about 0.01 to about 1 mg per kg of body weight administered intravenously are contemplated. Medications to reduce the risk of infusion-related reactions are contemplated, such as dexamethasone, acetaminophen, diphenhydramine or cetirizine, and ranitidine are contemplated. Multiple doses of about 0.3 mg per kilogram every 4 weeks for five doses are also contemplated. LNPs have been shown to be highly effective in delivering siRNAs to the liver (see, e.g., Tabernero et al., Cancer Discovery, April 2013, Vol. 3, No. 4, pages 363-470) and are therefore contemplated for delivering RNA encoding CRISPR Cas to the liver. A dosage of about four doses of 6 mg/kg of the LNP every two weeks may be contemplated. Tabernero et al. demonstrated that tumor regression was observed after the first 2 cycles of LNPs dosed at 0.7 mg/kg, and by the end of 6 cycles the patient had achieved a partial response with complete regression of the lymph node metastasis and substantial shrinkage of the liver tumors. A complete response was obtained after 40 doses in this patient, who has remained in remission and completed treatment after receiving doses over 26 months. Two patients with RCC and extrahepatic sites of disease including kidney, lung, and lymph nodes that were progressing following prior therapy with VEGF pathway inhibitors had stable disease at all sites for approximately 8 to 12 months, and a patient with PNET and liver metastases continued on the extension study for 18 months (36 doses) with stable disease. However, the charge of the LNP must be taken into consideration. As cationic lipids combined with negatively charged lipids to induce nonbilayer structures that facilitate intracellular delivery. Because charged LNPs are rapidly cleared from circulation following intravenous injection, ionizable cationic lipids with pKa values below 7 were developed (see, e.g., Rosin et al, Molecular Therapy, vol. 19, no. 12, pages 1286-220 December 2011). Negatively charged polymers such asiRNA may be loaded into LNPs at low pH values (e.g., pH 4) where the ionizable lipids display a positive charge. However, at physiological pH values, the LNPs exhibit a low surface charge compatible with longer circulation times. Four species of ionizable cationic lipids have been focused upon, namely 1,2-dilineoyl-3-dimethylammonium-propane (DLinDAP), 1,2-dilinoleyloxy-3-N,N-dimethylaminopropane (DLinDMA), 1,2-dilinoleyloxy-keto-N,N-dimethyl-3-aminopropane (DLinKDMA), and 1,2-dilinoleyl-4-(2-dimethylaminoethyl)-[1,3]-dioxolane (DLinKC2-DMA). It has been shown that LNP siRNA systems containing these lipids exhibit remarkably different gene silencing properties in hepatocytes in vivo, with potencies varying according to the series DLinKC2-DMA>DLinKDMA>DLinDMA>>DLinDAP employing a Factor VII gene silencing model (see, e.g., Rosin et al, Molecular Therapy, vol. 19, no. 12, pages 1286-220 December 2011). A dosage of 1 μg/ml levels may be contemplated, especially for a formulation containing DLinKC2-DMA.

[0447] Preparation of LNPs and CRISPR Cas encapsulation may be used/and or adapted from Rosin et al, Molecular Therapy, vol. 19, no. 12, pages 1286-220 December 2011). The cationic lipids 1,2-dilineoyl-3-dimethylammonium-propane (DLinDAP), 1,2-dilinoleyloxy-3-N,N-dimethylaminopropane (DLinDMA), 1,2-dilinoleyloxyketo-N,N-dimethyl-3-aminopropane (DLinK-DMA), 1,2-dilinoleyl-4-(2-dimethylaminoethyl)-[1,3]-dioxolane (DLinKC2-DMA), (3-o-[2″-(methoxypolyethyleneglycol 2000) succinoyl]-1,2-dimyristoyl-sn-glycol (PEG-S-DMG), and R-3-[(ω-methoxy-poly(ethylene glycol) 2000) carbamoyl]-1,2-dimyristyloxlpropyl-3-amine (PEG-C-DOMG) may be provided by Tekmira Pharmaceuticals (Vancouver, Canada) or synthesized. Cholesterol may be purchased from Sigma (St Louis, MO). The specific CRISPR Cas RNA may be encapsulated in LNPs containing DLinDAP, DLinDMA, DLinK-DMA, and DLinKC2-DMA (cationic lipid:DSPC:CHOL:PEGS-DMG or PEG-C-DOMG at 40:10:40:10 molar ratios). When required, 0.2% SP-DiOC18 (Invitrogen, Burlington, Canada) may be incorporated to assess cellular uptake, intracellular delivery, and biodistribution. Encapsulation may be performed by dissolving lipid mixtures comprised of cationic lipid:DSPC:cholesterol:PEG-c-DOMG (40:10:40:10 molar ratio) in ethanol to a final lipid concentration of 10 mmol/l. This ethanol solution of lipid may be added drop-wise to 50 mmol/l citrate, pH 4.0 to form multilamellar vesicles to produce a final concentration of 30% ethanol vol/vol. Large unilamellar vesicles may be formed following extrusion of multilamellar vesicles through two stacked 80 nm Nuclepore polycarbonate filters using the Extruder (Northern Lipids, Vancouver, Canada). Encapsulation may be achieved by adding RNA dissolved at 2 mg/ml in 50 mmol/l citrate, pH 4.0 containing 30% ethanol vol/vol drop-wise to extruded preformed large unilamellar vesicles and incubation at 31° C. for 30 minutes with constant mixing to a final RNA/lipid weight ratio of 0.06/1 wt/wt. Removal of ethanol and neutralization of formulation buffer were performed by dialysis against phosphate-buffered saline (PBS), pH 7.4 for 16 hours using Spectra/Por 2 regenerated cellulose dialysis membranes. Nanoparticle size distribution may be determined by dynamic light scattering using a NICOMP 370 particle sizer, the vesicle/intensity modes, and Gaussian fitting (Nicomp Particle Sizing, Santa Barbara, CA). The particle size for all three LNP systems may be ˜70 nm in diameter. siRNA encapsulation efficiency may be determined by removal of free siRNA using VivaPureD MiniH columns (Sartorius Stedim Biotech) from samples collected before and after dialysis. The encapsulated RNA may be extracted from the eluted nanoparticles and quantified at 260 nm. siRNA to lipid ratio was determined by measurement of cholesterol content in vesicles using the Cholesterol E enzymatic assay from Wako Chemicals USA (Richmond, VA). Preparation of large LNPs may be used/and or adapted from Rosin et al, Molecular Therapy, vol. 19, no. 12, pages 1286-220 December 2011. A lipid premix solution (20.4 mg/ml total lipid concentration) may be prepared in ethanol containing DLinKC2-DMA, DSPC, and cholesterol at 50:10:38.5 molar ratios. Sodium acetate may be added to the lipid premix at a molar ratio of 0.75:1 (sodium acetate:DLinKC2-DMA). The lipids may be subsequently hydrated by combining the mixture with 1.85 volumes of citrate buffer (10 mmol/l, pH 3.0) with vigorous stirring, resulting in spontaneous liposome formation in aqueous buffer containing 35% ethanol. The liposome solution may be incubated at 37° C. to allow for time-dependent increase in particle size. Aliquots may be removed at various times during incubation to investigate changes in liposome size by dynamic light scattering (Zetasizer Nano ZS, Malvern Instruments, Worcestershire, UK). Once the desired particle size is achieved, an aqueous PEG lipid solution (stock=10 mg/ml PEG-DMG in 35% (vol/vol) ethanol) may be added to the liposome mixture to yield a final PEG molar concentration of 3.5% of total lipid. Upon addition of PEG-lipids, the liposomes should their size, effectively quenching further growth. RNA may then be added to the empty liposomes at an siRNA to total lipid ratio of approximately 1:10 (wt:wt), followed by incubation for 30 minutes at 37° C. to form loaded LNPs. The mixture may be subsequently dialyzed overnight in PBS and filtered with a 0.45-μm syringe filter.

[0448] Spherical Nucleic Acid (SNA™) constructs and other nanoparticles (particularly gold nanoparticles) are also contemplate as a means to delivery CRISPR/Cas system to intended targets. Significant data show that AuraSense Therapeutics' Spherical Nucleic Acid (SNA™) constructs, based upon nucleic acid-functionalized gold nanoparticles, are superior to alternative platforms based on multiple key success factors, such as: High in vivo stability: Due to their dense loading, a majority of cargo (DNA or siRNA) remains bound to the constructs inside cells, conferring nucleic acid stability and resistance to enzymatic degradation. Deliverability: For all cell types studied (e.g., neurons, tumor cell lines, etc.) the constructs demonstrate a transfection efficiency of 99% with no need for carriers or transfection agents. Therapeutic targeting: The unique target binding affinity and specificity of the constructs allow exquisite specificity for matched target sequences (i.e., limited off-target effects). Superior efficacy: The constructs significantly outperform leading conventional transfection reagents (Lipofectamine 2000 and Cytofectin). Low toxicity: The constructs can enter a variety of cultured cells, primary cells, and tissues with no apparent toxicity. No significant immune response: The constructs elicit minimal changes in global gene expression as measured by whole-genome microarray studies and cytokine-specific protein assays. Chemical tailorability: Any number of single or combinatorial agents (e.g., proteins, peptides, small molecules) can be used to tailor the surface of the constructs. This platform for nucleic acid-based therapeutics may be applicable to numerous disease states, including inflammation and infectious disease, cancer, skin disorders and cardiovascular disease. Citable literature includes: Cutler et al., J. Am. Chem. Soc. 2011 133:9254-9257, Hao et al., Small. 2011 7:3158-3162, Zhang et al., ACS Nano. 2011 5:6962-6970, Cutler et al., J. Am. Chem. Soc. 2012 134:1376-1391, Young et al., Nano Lett. 2012 12:3867-71, Zheng et al., Proc. Natl. Acad. Sci. USA. 2012 109:11975-80, Mirkin, Nanomedicine 2012 7:635-638 Zhang et al., J. Am. Chem. Soc. 2012 134:16488-1691, Weintraub, Nature 2013 495: S14-S16, Choi et al., Proc. Natl. Acad. Sci. USA. 2013 110 (19): 7625-7630, Jensen et al., Sci. Transl. Med. 5, 209ra152 (2013) and Mirkin, et al., Small, 10:186-192.

[0449] Self-assembling nanoparticles with siRNA may be constructed with polyethyleneimine (PEI) that is PEGylated with an Arg-Gly-Asp (RGD) peptide ligand attached at the distal end of the polyethylene glycol (PEG), for example, as a means to target tumor neovasculature expressing integrins and used to deliver siRNA inhibiting vascular endothelial growth factor receptor-2 (VEGF R2) expression and thereby tumor angiogenesis (see, e.g., Schiffelers et al., Nucleic Acids Research, 2004, Vol. 32, No. 19). Nanoplexes may be prepared by mixing equal volumes of aqueous solutions of cationic polymer and nucleic acid to give a net molar excess of ionizable nitrogen (polymer) to phosphate (nucleic acid) over the range of 2 to 6. The electrostatic interactions between cationic polymers and nucleic acid resulted in the formation of polyplexes with average particle size distribution of about 100 nm, hence referred to here as nanoplexes. A dosage of about 100 to 200 mg of CRISPR Cas is envisioned for delivery in the self-assembling nanoparticles of Schiffelers et al.

[0450] The nanoplexes of Bartlett et al. (PNAS, Sep. 25, 2007, vol. 104, no. 39) may also be applied to the present invention. The nanoplexes of Bartlett et al. are prepared by mixing equal volumes of aqueous solutions of cationic polymer and nucleic acid to give a net molar excess of ionizable nitrogen (polymer) to phosphate (nucleic acid) over the range of 2 to 6. The electrostatic interactions between cationic polymers and nucleic acid resulted in the formation of polyplexes with average particle size distribution of about 100 nm, hence referred to here as nanoplexes. The DOTA-siRNA of Bartlett et al. was synthesized as follows: 1,4,7,10-tetraazacyclododecane-1,4,7,10-tetraacetic acid mono(N-hydroxysuccinimide ester) (DOTA-NHSester) was ordered from Macrocyclics (Dallas, TX). The amine modified RNA sense strand with a 100-fold molar excess of DOTA-NHS-ester in carbonate buffer (pH 9) was added to a microcentrifuge tube. The contents were reacted by stirring for 4 h at room temperature. The DOTA-RNAsense conjugate was ethanol-precipitated, resuspended in water, and annealed to the unmodified antisense strand to yield DOTA-siRNA. All liquids were pretreated with Chelex-100 (Bio-Rad, Hercules, CA) to remove trace metal contaminants. Tf-targeted and nontargeted siRNA nanoparticles may be formed by using cyclodextrin-containing polycations. Typically, nanoparticles were formed in water at a charge ratio of 3 (+/−) and an siRNA concentration of 0.5 g/liter. One percent of the adamantane-PEG molecules on the surface of the targeted nanoparticles were modified with Tf (adamantane-PEG-Tf). The nanoparticles were suspended in a 5% (wt/vol) glucose carrier solution for injection.

[0451] Davis et al. (Nature, Vol 464, 15 Apr. 2010) conducts a siRNA clinical trial that uses a targeted nanoparticle-delivery system (clinical trial registration number NCT00689065). Patients with solid cancers refractory to standard-of-care therapies are administered doses of targeted nanoparticles on days 1, 3, 8 and 10 of a 21-day cycle by a 30-min intravenous infusion. The nanoparticles consist of a synthetic delivery system containing: (1) a linear, cyclodextrin-based polymer (CDP), (2) a human transferrin protein (TF) targeting ligand displayed on the exterior of the nanoparticle to engage TF receptors (TFR) on the surface of the cancer cells, (3) a hydrophilic polymer (polyethylene glycol (PEG) used to promote nanoparticle stability in biological fluids), and (4) siRNA designed to reduce the expression of the RRM2 (sequence used in the clinic was previously denoted siR2B+5). The TFR has long been known to be upregulated in malignant cells, and RRM2 is an established anti-cancer target. These nanoparticles (clinical version denoted as CALAA-01) have been shown to be well tolerated in multi-dosing studies in non-human primates. Although a single patient with chronic myeloid leukaemia has been administered siRNAby liposomal delivery, Davis et al.'s clinical trial is the initial human trial to systemically deliver siRNA with a targeted delivery system and to treat patients with solid cancer. To ascertain whether the targeted delivery system can provide effective delivery of functional siRNA to human tumours, Davis et al. investigated biopsies from three patients from three different dosing cohorts; patients A, B and C, all of whom had metastatic melanoma and received CALAA-01 doses of 18, 24 and 30 mg m2 siRNA, respectively. Similar doses may also be contemplated for the CRISPR Cas system of the present invention. The delivery of the invention may be achieved with nanoparticles containing a linear, cyclodextrin-based polymer (CDP), a human transferrin protein (TF) targeting ligand displayed on the exterior of the nanoparticle to engage TF receptors (TFR) on the surface of the cancer cells and/or a hydrophilic polymer (for example, polyethylene glycol (PEG) used to promote nanoparticle stability in biological fluids).

### Exosomes

[0452] Exosomes are endogenous nano-vesicles that transport RNAs and proteins which can deliver short interfering (si) RNA to the brain and other target organs. To reduce immunogenicity, Alvarez-Erviti et al. (2011, Nat Biotechnol 29:341) used self-derived dendritic cells for exosome production. Targeting was achieved by engineering the dendritic cells to express Lamp2b, an exosomal membrane protein, fused to the neuron-specific RVG peptide3. Purified exosomes were loaded with exogenous siRNA by electroporation. Intravenously injected RVG-targeted exosomes delivered GAPDH siRNA specifically to neurons, microglia, oligodendrocytes in the brain, resulting in a specific gene knockdown. Pre-exposure to RVG exosomes did not attenuate knockdown, and non-specific uptake in other tissues was not observed. The therapeutic potential of exosome-mediated siRNA delivery was demonstrated by the strong mRNA (60%) and protein (62%) knockdown of BACE1, a therapeutic target in Alzheimer's disease. To obtain a pool of immunologically inert exosomes, Alvarez-Erviti et al. harvested bone marrow from inbred C57BL/6 mice with a homogenous major histocompatibility complex (MHC) haplotype. As immature dendritic cells produce large quantities of exosomes devoid of T-cell activators such as MHC-II and CD86, Alvarez-Erviti et al. selected for dendritic cells with granulocyte/macrophage-colony stimulating factor (GM-CSF) for 7 d. Exosomes were purified from the culture supernatant the following day using well-established ultracentrifugation protocols. The exosomes produced were physically homogenous, with a size distribution peaking at 80 nm in diameter as determined by nanoparticle tracking analysis (NTA) and electron microscopy. Alvarez-Erviti et al. obtained 6-12 μg of exosomes (measured based on protein concentration) per 10⁶ cells. Next, Alvarez-Erviti et al. investigated the possibility of loading modified exosomes with exogenous cargoes using electroporation protocols adapted for nanoscale applications. As electroporation for membrane particles at the nanometer scale is not well-characterized, nonspecific Cy5-labeled siRNA was used for the empirical optimization of the electroporation protocol. The amount of encapsulated siRNA was assayed after ultracentrifugation and lysis of exosomes. Electroporation at 400 V and 125 μF resulted in the greatest retention of siRNA and was used for all subsequent experiments. Alvarez-Erviti et al. administered 150 μg of each BACE1 siRNA encapsulated in 150 μg of RVG exosomes to normal C57BL/6 mice and compared the knockdown efficiency to four controls: untreated mice, mice injected with RVG exosomes only, mice injected with BACE1 siRNA complexed to an in vivo cationic liposome reagent and mice injected with BACE1 siRNA complexed to RVG-9R, the RVG pep tide conjugated to 9 D-arginines that electrostatically binds to the siRNA. Cortical tissue samples were analyzed 3 d after administration and a significant protein knockdown (45%, P<0.05, versus 62%, P<0.01) in both siRNA-RVG-9R-treated and siRNARVG exosome-treated mice was observed, resulting from a significant decrease in BACE1 mRNA levels (66% [+ or −] 15%, P<0.001 and 61% [+ or −] 13% respectively, P<0.01). Moreover, Applicants demonstrated a significant decrease (55%, P<0.05) in the total [beta]-amyloid 1-42 levels, a main component of the amyloid plaques in Alzheimer's pathology, in the RVG-exosome-treated animals. The decrease observed was greater than the β-amyloid 1-40 decrease demonstrated in normal mice after intraventricular injection of BACE1 inhibitors. Alvarez-Erviti et al. carried out 5′-rapid amplification of cDNA ends (RACE) on BACE1 cleavage product, which provided evidence of RNAi-mediated knockdown by the siRNA. Finally, Alvarez-Erviti et al. investigated whether siRNA-RVG exosomes induced immune responses in vivo by assessing IL-6, IP-10, TNFα and IFN-α serum concentrations. Following siRNA-RVG exosome treatment, nonsignificant changes in all cytokines were registered similar to siRNA-transfection reagent treatment in contrast to siRNA-RVG-9R, which potently stimulated IL-6 secretion, confirming the immunologically inert profile of the exosome treatment. Given that exosomes encapsulate only 20% of siRNA, delivery with RVG-exosome appears to be more efficient than RVG-9R delivery as comparable mRNA knockdown and greater protein knockdown was achieved with fivefold less siRNA without the corresponding level of immune stimulation. This experiment demonstrated the therapeutic potential of RVG-exosome technology, which is potentially suited for long-term silencing of genes related to neurodegenerative diseases. The exosome delivery system of Alvarez-Erviti et al. may be applied to deliver the CRISPR-Cas system of the present invention to therapeutic targets, especially neurodegenerative diseases. A dosage of about 100 to 1000 mg of CRISPR Cas encapsulated in about 100 to 1000 mg of RVG exosomes may be contemplated for the present invention.

[0453] El-Andaloussi et al. (Nature Protocols 7, 2112-2126 (2012)) discloses how exosomes derived from cultured cells can be harnessed for delivery of siRNA in vitro and in vivo. This protocol first describes the generation of targeted exosomes through transfection of an expression vector, comprising an exosomal protein fused with a peptide ligand. Next, El-Andaloussi et al. explain how to purify and characterize exosomes from transfected cell supernatant. Next, El-Andaloussi et al. detail crucial steps for loading siRNA into exosomes. Finally, El-Andaloussi et al. outline how to use exosomes to efficiently deliver siRNA in vitro and in vivo in mouse brain. Examples of anticipated results in which exosome-mediated siRNA delivery is evaluated by functional assays and imaging are also provided. The entire protocol takes ˜3 weeks. Delivery or administration according to the invention may be performed using exosomes produced from self-derived dendritic cells.

[0454] In another embodiment, the plasma exosomes of Wahlgren et al. (Nucleic Acids Research, 2012, Vol. 40, No. 17 e130) are contemplated. Exosomes are nano-sized vesicles (30-90 nm in size) produced by many cell types, including dendritic cells (DC), B cells, T cells, mast cells, epithelial cells and tumor cells. These vesicles are formed by inward budding of late endosomes and are then released to the extracellular environment upon fusion with the plasma membrane. Because exosomes naturally carry RNA between cells, this property might be useful in gene therapy.

[0455] Exosomes from plasma are prepared by centrifugation of buffy coat at 900 g for 20 min to isolate the plasma followed by harvesting cell supernatants, centrifuging at 300 g for 10 min to eliminate cells and at 16 500 g for 30 min followed by filtration through a 0.22 mm filter. Exosomes are pelleted by ultracentrifugation at 120 000 g for 70 min. Chemical transfection of siRNA into exosomes is carried out according to the manufacturer's instructions in RNAi Human/Mouse Starter Kit (Quiagen, Hilden, Germany). siRNA is added to 100 ml PBS at a final concentration of 2 mmol/ml. After adding HiPerFect transfection reagent, the mixture is incubated for 10 min at RT. In order to remove the excess of micelles, the exosomes are re-isolated using aldehyde/sulfate latex beads. The chemical transfection of CRISPR Cas into exosomes may be conducted similarly to siRNA. The exosomes may be co-cultured with monocytes and lymphocytes isolated from the peripheral blood of healthy donors. Therefore, it may be contemplated that exosomes containing CRISPR Cas may be introduced to monocytes and lymphocytes of and autologously reintroduced into a human. Accordingly, delivery or administration according to the invention may beperformed using plasma exosomes.

### Liposomes'

[0456] Delivery or administration according to the invention can be performed with liposomes. Liposomes are spherical vesicle structures composed of a uni- or multilamellar lipid bilayer surrounding internal aqueous compartments and a relatively impermeable outer lipophilic phospholipid bilayer. Liposomes have gained considerable attention as drug delivery carriers because they are biocompatible, nontoxic, can deliver both hydrophilic and lipophilic drug molecules, protect their cargo from degradation by plasma enzymes, and transport their load across biological membranes and the blood brain barrier (BBB) (see, e.g., Spuch and Navarro, Journal of Drug Delivery, vol. 2011, Article ID 469679, 12 pages, 2011. doi: 10.1155/2011/469679 for review). Liposomes can be made from several different types of lipids; however, phospholipids are most commonly used to generate liposomes as drug carriers. Although liposome formation is spontaneous when a lipid film is mixed with an aqueous solution, it can also be expedited by applying force in the form of shaking by using a homogenizer, sonicator, or an extrusion apparatus (see, e.g., Spuch and Navarro, Journal of Drug Delivery, vol. 2011, Article ID 469679, 12 pages, 2011. doi: 10.1155/2011/469679 for review). Several other additives may be added to liposomes in order to modify their structure and properties. For instance, either cholesterol or sphingomyelin may be added to the liposomal mixture in order to help stabilize the liposomal structure and to prevent the leakage of the liposomal inner cargo. Further, liposomes are prepared from hydrogenated egg phosphatidylcholine or egg phosphatidylcholine, cholesterol, and dicetyl phosphate, and their mean vesicle sizes were adjusted to about 50 and 100 nm. (see, e.g., Spuch and Navarro, Journal of Drug Delivery, vol. 2011, Article ID 469679, 12 pages, 2011. doi: 10.1155/2011/469679 for review). A liposome formulation may be mainly comprised of natural phospholipids and lipids such as 1,2-distearoryl-sn-glycero-3-phosphatidyl choline (DSPC), sphingomyelin, egg phosphatidylcholines and monosialoganglioside. Since this formulation is made up of phospholipids only, liposomal formulations have encountered many challenges, one of the ones being the instability in plasma. Several attempts to overcome these challenges have been made, specifically in the manipulation of the lipid membrane. One of these attempts focused on the manipulation of cholesterol. Addition of cholesterol to conventional formulations reduces rapid release of the encapsulated bioactive compound into the plasma or 1,2-dioleoyl-sn-glycero-3-phosphoethanolamine (DOPE) increases the stability (see, e.g., Spuch and Navarro, Journal of Drug Delivery, vol. 2011, Article ID 469679, 12 pages, 2011. doi: 10.1155/2011/469679 for review). In a particularly advantageous embodiment, Trojan Horse liposomes (also known as Molecular Trojan Horses) are desirable and protocols may be found at cshprotocols.cshlp.org/content/2010/4/pdb.prot5407.long. These particles allow delivery of a transgene to the entire brain after an intravascular injection. Without being bound by limitation, it is believed that neutral lipid particles with specific antibodies conjugated to surface allow crossing of the blood brain barrier via endocytosis. Utilizing Trojan Horse Liposomes to deliver the CRISPR family of nucleases to the brain via an intravascular injection, can allow whole brain transgenic animals without the need for embryonic manipulation. About 1-5 g of DNA or RNA may be contemplated for in vivo administration in liposomes.

[0457] In another embodiment, the CRISPR Cas system may be administered in liposomes, such as a stable nucleic-acid-lipid particle (SNALP) (see, e.g., Morrissey et al., Nature Biotechnology, Vol. 23, No. 8, August 2005). Daily intravenous injections of about 1, 3 or 5 mg/kg/day of a specific CRISPR Cas targeted in a SNALP are contemplated. The daily treatment may be over about three days and then weekly for about five weeks. In another embodiment, a specific CRISPR Cas encapsulated SNALP) administered by intravenous injection to at doses of about 1 or 2.5 mg/kg are also contemplated (see, e.g., Zimmerman et al., Nature Letters, Vol. 441, 4 May 2006). The SNALP formulation may contain the lipids 3-N-[(wmethoxypoly(ethylene glycol) 2000) carbamoyl]-1,2-dimyristyloxy-propylamine (PEG-C-DMA), 1,2-dilinoleyloxy-N,N-dimethyl-3-aminopropane (DLinDMA), 1,2-distearoyl-sn-glycero-3-phosphocholine (DSPC) and cholesterol, in a 2:40:10:48 molar percent ratio (see, e.g., Zimmerman et al., Nature Letters, Vol. 441, 4 May 2006).

[0458] In another embodiment, stable nucleic-acid-lipid particles (SNALPs) have proven to be effective delivery molecules to highly vascularized HepG2-derived liver tumors but not in poorly vascularized HCT-116 derived liver tumors (see, e.g., Li, Gene Therapy (2012) 19, 775-780). The SNALP liposomes may be prepared by formulating D-Lin-DMA and PEG-C-DMA with distearoylphosphatidylcholine (DSPC), Cholesterol and siRNA using a 25:1 lipid/siRNA ratio and a 48/40/10/2 molar ratio of Cholesterol/D-Lin-DMA/DSPC/PEG-C-DMA. The resulted SNALP liposomes are about 80-100 nm in size.

[0459] In yet another embodiment, a SNALP may comprise synthetic cholesterol (Sigma-Aldrich, St Louis, MO, USA), dipalmitoylphosphatidylcholine (Avanti Polar Lipids, Alabaster, AL, USA), 3-N-[(w-methoxy poly(ethylene glycol) 2000) carbamoyl]-1,2-dimyrestyloxypropylamine, and cationic 1,2-dilinoleyloxy-3-N,Ndimethylaminopropane (see, e.g., Geisbert et al., Lancet 2010; 375:1896-905). A dosage of about 2 mg/kg total CRISPR Cas per dose administered as, for example, a bolus intravenous infusion may be contemplated.

[0460] In yet another embodiment, a SNALP may comprise synthetic cholesterol (Sigma-Aldrich), 1,2-distearoyl-sn-glycero-3-phosphocholine (DSPC; Avanti Polar Lipids Inc.), PEG-CDMA, and 1,2-dilinoleyloxy-3-(N;N-dimethyl)aminopropane (DLinDMA) (see, e.g., Judge, J. Clin. Invest. 119:661-673 (2009)). Formulations used for in vivo studies may comprise a final lipid/RNA mass ratio of about 9:1.

[0461] The safety profile of RNAi nanomedicines has been reviewed by Barros and Gollob of Alnylam Pharmaceuticals (see, e.g., Advanced Drug Delivery Reviews 64 (2012) 1730-1737). The stable nucleic acid lipid particle (SNALP) is comprised of four different lipids—an ionizable lipid (DLinDMA) that is cationic at low pH, a neutral helper lipid, cholesterol, and a diffusible polyethylene glycol (PEG)-lipid. The particle is approximately 80 nm in diameter and is charge-neutral at physiologic pH. During formulation, the ionizable lipid serves to condense lipid with the anionic siRNA during particle formation. When positively charged under increasingly acidic endosomal conditions, the ionizable lipid also mediates the fusion of SNALP with the endosomal membrane enabling release of siRNA into the cytoplasm. The PEG-lipid stabilizes the particle and reduces aggregation during formulation, and subsequently provides a neutral hydrophilic exterior that improves pharmacokinetic properties.

[0462] To date, two clinical programs have been initiated using SNALPsiRNA formulations. Tekmira Pharmaceuticals recently completed a phase I single-dose study of SNALP-ApoB in adult volunteers with elevated LDL cholesterol. ApoB is predominantly expressed in the liver and jejunum and is essential for the assembly and secretion of VLDL and LDL. Seventeen subjects received a single dose of SNALP-ApoB (dose escalation across 7 dose levels). There was no evidence of liver toxicity (anticipated as the potential dose-limiting toxicity based on preclinical studies). One (of two) subjects at the highest dose experienced flu-like symptoms consistent with immune system stimulation, and the decision was made to conclude the trial. Alnylam Pharmaceuticals has similarly advanced ALN-TTR01, which employs the SNALP technology described above and targets hepatocyte production of both mutant and wild-type TTR to treat TTR amyloidosis (ATTR). Three ATTR syndromes have been described: familial amyloidotic polyneuropathy (FAP) and familial amyloidotic cardiomyopathy (FAC)-both caused by autosomal dominant mutations in TTR; and senile systemic amyloidosis (SSA) cause by wildtype TTR. A placebo-controlled, single dose-escalation phase I trial of ALN-TTR01 was recently completed in patients with ATTR. ALN-TTR01 was administered as a 15-minute IV infusion to 31 patients (23 with study drug and 8 with placebo) within a dose range of 0.01 to 1.0 mg/kg (based on siRNA). Treatmentwaswell tolerated with no significant increases in liver function tests. Infusion-related reactions were noted in 3 of 23 patients at >0.4 mg/kg; all responded to slowing of the infusion rate and all continued on study. Minimal and transient elevations of serum cytokines IL-6, IP-10 and IL-Ira were noted in two patients at the highest dose of 1 mg/kg (as anticipated from preclinical and NHP studies). Lowering of serum TTR, the expected pharmacodynamics effect of ALN-TTR01, was observed at 1 mg/kg.

[0463] In yet another embodiment, a SNALP may be made by solubilizing a cationic lipid, DSPC, cholesterol and PEG-lipid were solubilized in ethanol at a molar ratio of 40:10:40:10, respectively (see, Semple et al., Nature Niotechnology, Volume 28 Number 2 Feb. 2010, pp. 172-177). The lipid mixture was added to an aqueous buffer (50 mM citrate, pH 4) with mixing to a final ethanol and lipid concentration of 30% (vol/vol) and 6.1 mg/ml, respectively, and allowed to equilibrate at 22° C. for 2 min before extrusion. The hydrated lipids were extruded through two stacked 80 nm pore-sized filters (Nuclepore) at 22° C. using a Lipex Extruder (Northern Lipids) until a vesicle diameter of 70-90 nm, as determined by dynamic light scattering analysis, was obtained. This generally required 1-3 passes. The siRNA (solubilized in a 50 mM citrate, pH 4 aqueous solution containing 30% ethanol) was added to the pre-equilibrated (35° C.) vesicles at a rate of ˜5 ml/min with mixing. After a final target siRNA/lipid ratio of 0.06 (wt/wt) was reached, the mixture was incubated for a further 30 min at 35° C. to allow vesicle reorganization and encapsulation of the siRNA. The ethanol was then removed and the external buffer replaced with PBS (155 mM NaCl, 3 mM Na2HPO4, 1 mM KH2PO4, pH 7.5) by either dialysis or tangential flow diafiltration. siRNA were encapsulated in SNALP using a controlled step-wise dilution method process. The lipid constituents of KC2-SNALP were DLin-KC2-DMA (cationic lipid), dipalmitoylphosphatidylcholine (DPPC; Avanti Polar Lipids), synthetic cholesterol (Sigma) and PEG-C-DMA used at a molar ratio of 57.1:7.1:34.3:1.4. Upon formation of the loaded particles, SNALP were dialyzed against PBS and filter sterilized through a 0.2 μm filter before use. Mean particle sizes were 75-85 nm and 90-95% of the siRNA was encapsulated within the lipid particles. The final siRNA/lipid ratio in formulations used for in vivo testing was ˜0.15 (wt/wt). LNP-siRNA systems containing Factor VII siRNA were diluted to the appropriate concentrations in sterile PBS immediately before use and the formulations were administered intravenously through the lateral tail vein in a total volume of 10 ml/kg. This method may be extrapolated to the CRISPR Cas system of the present invention.

### Other Lipids

[0464] Other cationic lipids, such as amino lipid 2,2-dilinoleyl-4-dimethylaminoethyl-[1,3]-dioxolane (DLin-KC2-DMA) may be utilized to encapsulate CRISPR Cas similar to SiRNA (see, e.g., Jayaraman, Angew. Chem. Int. Ed. 2012, 51, 8529-8533). A preformed vesicle with the following lipid composition be may contemplated: amino lipid, distearoylphosphatidylcholine (DSPC), cholesterol and (R)-2,3-bis(octadecyloxy) propyl-1-(methoxy poly(ethylene glycol) 2000) propylcarbamate (PEG-lipid) in the molar ratio 40/10/40/10, respectively, and a FVII siRNA/total lipid ratio of approximately 0.05 (w/w). To ensure a narrow particle size distribution in the range of 70-90 nm and a low polydispersity index of 0.11_0.04 (n=56), the particles may be extruded up to three times through 80 nm membranes prior to adding the CRISPR Cas RNA. Particles containing the highly potent amino lipid 16 may be used, in which the molar ratio of the four lipid components 16, DSPC, cholesterol and PEG-lipid (50/10/38.5/1.5) which may be further optimized to enhance in vivo activity. Michael S D Kormann et al. (“Expression of therapeutic proteins after delivery of chemically modified mRNA in mice: Nature Biotechnology, Volume: 29, Pages: 154-157 (2011)) describes the use of lipid envelopes to deliver RNA. Use of lipid envelopes is also preferred in the present invention.

[0465] In another embodiment, lipids may be formulated with the CRISPR Cas system of the present invention to form lipid nanoparticles (LNPs). Lipids include, but are not limited to, DLin-KC2-DMA4, C12-200 and colipids disteroylphosphatidyl choline, cholesterol, and PEG-DMG may be formulated with CRISPR Cas instead of siRNA (see, e.g., Novobrantseva, Molecular Therapy-Nucleic Acids (2012) 1, e4; doi: 10.1038/mtna.2011.3) using a spontaneous vesicle formation procedure. The component molar ratio may be about 50/10/38.5/1.5 (DLin-KC2-DMA or C12-200/disteroylphosphatidyl choline/cholesterol/PEG-DMG). The final lipid:siRNA weight ratio may be ˜12:1 and 9:1 in the case of DLin-KC2-DMA and C12-200 lipid nanoparticles (LNPs), respectively. The formulations may have mean particle diameters of ˜80 nm with >90% entrapment efficiency. A 3 mg/kg dose may be contemplated.

[0466] Tekmira has a portfolio of approximately 95 patent families, in the U.S. and abroad, that are directed to various aspects of LNPs and LNP formulations (see, e.g., U.S. Pat. Nos. 7,982,027; 7,799,565; 8,058,069; 8,283,333; 7,901,708; 7,745,651; 7,803,397; 8,101,741; 8,188,263; 7,915,399; 8,236,943 and 7,838,658 and European Pat. Nos. 1766035; 1519714; 1781593 and 1664316), all of which may be used and/or adapted to the present invention.

[0467] The CRISPR Cas system may be delivered encapsulated in PLGA Microspheres such as that further described in US published application 20130252281 and 20130245107 and 20130244279 (assigned to Moderna Therapeutics) which relate to aspects of formulation of compositions comprising modified nucleic acid molecules which may encode a protein, a protein precursor, or a partially or fully processed form of the protein or a protein precursor. The formulation may have a molar ratio 50:10:38.5:1.5-3.0 (cationic lipid:fusogenic lipid:cholesterol:PEG lipid). The PEG lipid may be selected from, but is not limited to PEG-c-DOMG, PEG-DMG. The fusogenic lipid may be DSPC. See also, Schrum et al., Delivery and Formulation of Engineered Nucleic Acids, US published application No. 20120251618.

[0468] Nanomerics' technology addresses bioavailability challenges for a broad range of therapeutics, including low molecular weight hydrophobic drugs, peptides, and nucleic acid based therapeutics (plasmid, siRNA, miRNA). Specific administration routes for which the technology has demonstrated clear advantages include the oral route, transport across the blood-brain-barrier, delivery to solid tumours, as well as to the eye. See, e.g., Mazza et al., 2013, ACS Nano. 2013 Feb. 26; 7 (2): 1016-26; Uchegbu and Siew, 2013, J Pharm Sci. 102 (2): 305-10 and Lalatsa et al., 2012, J Control Release. 2012 Jul. 20; 161 (2): 523-36. US Patent Publication No. 20050019923 describes cationic dendrimers for delivering bioactive molecules, such as polynucleotide molecules, peptides and polypeptides and/or pharmaceutical agents, to a mammalian body. The dendrimers are suitable for targeting the delivery of the bioactive molecules to, for example, the liver, spleen, lung, kidney or heart. Dendrimers are synthetic 3-dimensional macromolecules that are prepared in a step-wise fashion from simple branched monomer units, the nature and functionality of which can be easily controlled and varied. Dendrimers are synthesised from the repeated addition of building blocks to a multifunctional core (divergent approach to synthesis), or towards a multifunctional core (convergent approach to synthesis) and each addition of a 3-dimensional shell of building blocks leads to the formation of a higher generation of the dendrimers. Polypropylenimine dendrimers start from a diaminobutane core to which is added twice the number of amino groups by a double Michael addition of acrylonitrile to the primary amines followed by the hydrogenation of the nitriles. This results in a doubling of the amino groups. Polypropylenimine dendrimers contain 100% protonable nitrogens and up to 64 terminal amino groups (generation 5, DAB 64). Protonable groups are usually amine groups which are able to accept protons at neutral pH. The use of dendrimers as gene delivery agents has largely focused on the use of the polyamidoamine. and phosphorous containing compounds with a mixture of amine/amide or N—P(O₂) S as the conjugating units respectively with no work being reported on the use of the lower generation polypropylenimine dendrimers for gene delivery. Polypropylenimine dendrimers have also been studied as pH sensitive controlled release systems for drug delivery and for their encapsulation of guest molecules when chemically modified by peripheral amino acid groups. The cytotoxicity and interaction of polypropylenimine dendrimers with DNA as well as the transfection efficacy of DAB 64 has also been studied. US Patent Publication No. 20050019923 is based upon the observation that, contrary to earlier reports, cationic dendrimers, such as polypropylenimine dendrimers, display suitable properties, such as specific targeting and low toxicity, for use in the targeted delivery of bioactive molecules, such as genetic material. In addition, derivatives of the cationic dendrimer also display suitable properties for the targeted delivery of bioactive molecules. See also, Bioactive Polymers, US published application No. 20080267903, which discloses “Various polymers, including cationic polyamine polymers and dendrimeric polymers, are shown to possess anti-proliferative activity, and may therefore be useful for treatment of disorders characterised by undesirable cellular proliferation such as neoplasms and tumours, inflammatory disorders (including autoimmune disorders), psoriasis and atherosclerosis. The polymers may be used alone as active agents, or as delivery vehicles for other therapeutic agents, such as drug molecules or nucleic acids for gene therapy. In such cases, the polymers' own intrinsic anti-tumour activity may complement the activity of the agent to be delivered.”

### Supercharged Proteins

[0469] Supercharged proteins are a class of engineered or naturally occurring proteins with unusually high positive or negative net theoretical charge. Both supernegatively and superpositively charged proteins exhibit a remarkable ability to withstand thermally or chemically induced aggregation. Superpositively charged proteins are also able to penetrate mammalian cells. Associating cargo with these proteins, such as plasmid DNA, siRNA, or other proteins, can enable the functional delivery of these macromolecules into mammalian cells both in vitro and in vivo. David Liu's lab reported the creation and characterization of supercharged proteins in 2007 (Lawrence et al., 2007, Journal of the American Chemical Society 129, 10110-10112). The nonviral delivery of siRNA and plasmid DNA into mammalian cells are valuable both for research and therapeutic applications (Akinc et al., 2010, Nat. Biotech. 26, 561-569). Purified+36 GFP protein (or other superpositively charged protein) is mixed with siRNAs in the appropriate serum-free media and allowed to complex prior addition to cells. Inclusion of serum at this stage inhibits formation of the supercharged protein-siRNA complexes and reduces the effectiveness of the treatment. The following protocol has been found to be effective for a variety of cell lines (McNaughton et al., 2009, Proc. Natl. Acad. Sci. USA 106, 6111-6116). However, pilot experiments varying the dose of protein and RNA, e.g., siRNA or CRISPR RNA can be performed to optimize the procedure for specific cell lines.
[0470] (1) One day before treatment, plate 1×10⁵ cells per well in a 48-well plate.
[0471] (2) On the day of treatment, dilute purified+36 GFP protein in serumfree media to a final concentration 200 nM. Add siRNA or CRISPR RNA to a final concentration of 50 nM. Vortex to mix and incubate at room temperature for 10 min.
[0472] (3) During incubation, aspirate media from cells and wash once with PBS.
[0473] (4) Following incubation of +36 GFP and siRNA or CRISPR RNA, add the protein-siRNA or CRISPR RNA complexes to cells.
[0474] (5) Incubate cells with complexes at 37 C for 4 h.
[0475] (6) Following incubation, aspirate the media and wash three times with 20 U/mL heparin PBS. Incubate cells with serum-containing media for a further 48 h or longer depending upon the assay for knockdown.
[0476] (7) Analyze cells by immunoblot, qPCR, phenotypic assay, or other appropriate method.

[0477] David Liu's lab has further found+36 GFP to be an effective plasmid delivery reagent in a range of cells. As plasmid DNA is a larger cargo than siRNA, proportionately more +36 GFP protein is required to effectively complex plasmids. For effective plasmid delivery Applicants have developed a variant of +36 GFP bearing a C-terminal HA2 peptide tag, a known endosome-disrupting peptide derived from the influenza virus hemagglutinin protein. The following protocol has been effective in a variety of cells, but as above it is advised that plasmid DNA and supercharged protein doses be optimized for specific cell lines and delivery applications.
[0478] (1) One day before treatment, plate 1×10⁵ per well in a 48-well plate.
[0479] (2) On the day of treatment, dilute purified p36 GFP protein in serumfree media to a final concentration 2 mM. Add 1 mg of plasmid DNA. Vortex to mix and incubate at room temperature for 10 min.
[0480] (3) During incubation, aspirate media from cells and wash once with PBS.
[0481] (4) Following incubation of p36 GFP and plasmid DNA, gently add the protein-DNA complexes to cells.
[0482] (5) Incubate cells with complexes at 37 C for 4 h.
[0483] (6) Following incubation, aspirate the media and wash with PBS. Incubate cells in serum-containing media and incubate for a further 24-48 h.
[0484] (7) Analyze plasmid delivery (e.g., by plasmid-driven gene expression) as appropriate.

[0485] See also, e.g., McNaughton et al., Proc. Natl. Acad. Sci. USA 106, 6111-6116 (2009); Cronican et al., ACS Chemical Biology 5, 747-752 (2010); Cronican et al., Chemistry & Biology 18, 833-838 (2011); Thompson et al., Methods in Enzymology 503, 293-319 (2012); Thompson, D. B., et al., Chemistry & Biology 19 (7), 831-843 (2012). The methods of the super charged proteins may be used and/or adapted for delivery of the CRISPR Cas system of the present invention.

### Implantable Devices

[0486] In another embodiment, implantable devices are also contemplated for delivery of the CRISPR Cas system. For example, US Patent Publication 20110195123 discloses an implantable medical device which elutes a drug locally and in prolonged period is provided, including several types of such a device, the treatment modes of implementation and methods of implantation. The device comprising of polymeric substrate, such as a matrix for example, that is used as the device body, and drugs, and in some cases additional scaffolding materials, such as metals or additional polymers, and materials to enhance visibility and imaging. The selection of drug is based on the advantageous of releasing drug locally and in prolonged period, where drug is released directly to the extracellular matrix (ECM) of the diseased area such as tumor, inflammation, degeneration or for symptomatic objectives, or to injured smooth muscle cells, or for prevention. One kind of drug is the gene silencing drugs based on RNA interference (RNAi), including but not limited to si RNA, sh RNA, or antisense RNA/DNA, ribozyme and nucleoside analogs. Therefore, this system may be used/and or adapted to the CRISPR Cas system of the present invention. The modes of implantation in some embodiments are existing implantation procedures that are developed and used today for other treatments, including brachytherapy and needle biopsy. In such cases the dimensions of the new implant described in this invention are similar to the original implant. Typically a few devices are implanted during the same treatment procedure. As described in US Patent Publication 20110195123, there is provided a drug delivery implantable or insertable system, including systems applicable to a cavity such as the abdominal cavity and/or any other type of administration in which the drug delivery system is not anchored or attached, comprising a biostable and/or degradable and/or bioabsorbable polymeric substrate, which may for example optionally be a matrix. It should be noted that the term “insertion” also includes implantation. The drug delivery system is preferably implemented as a “Loder” as described in US Patent Publication 20110195123. The polymer or plurality of polymers are biocompatible, incorporating an agent and/or plurality of agents, enabling the release of agent at a controlled rate, wherein the total volume of the polymeric substrate, such as a matrix for example, in some embodiments is optionally and preferably no greater than a maximum volume that permits a therapeutic level of the agent to be reached. As a non-limiting example, such a volume is preferably within the range of 0.1 m3 to 1000 mm3, as required by the volume for the agent load. The Loder may optionally be larger, for example when incorporated with a device whose size is determined by functionality, for example and without limitation, a knee joint, an intra-uterine or cervical ring and the like. The drug delivery system (for delivering the composition) is designed in some embodiments to preferably employ degradable polymers, wherein the main release mechanism is bulk erosion; or in some embodiments, non degradable, or slowly degraded polymers are used, wherein the main release mechanism is diffusion rather than bulk erosion, so that the outer part functions as membrane, and its internal part functions as a drug reservoir, which practically is not affected by the surroundings for an extended period (for example from about a week to about a few months). Combinations of different polymers with different release mechanisms may also optionally be used. The concentration gradient at the surface is preferably maintained effectively constant during a significant period of the total drug releasing period, and therefore the diffusion rate is effectively constant (termed “zero mode” diffusion). By the term “constant” it is meant a diffusion rate that is preferably maintained above the lower threshold of therapeutic effectiveness, but which may still optionally feature an initial burst and/or fluctuate, for example increasing and decreasing to a certain degree. The diffusion rate is preferably so maintained for a prolonged period, and it can be considered constant to a certain level to optimize the therapeutically effective period, for example the effective silencing period. The drug delivery system optionally and preferably is designed to shield the nucleotide based therapeutic agent from degradation, whether chemical in nature or due to attack from enzymes and other factors in the body of the subject. The drug delivery system as described in US Patent Publication 20110195123 is optionally associated with sensing and/or activation appliances that are operated at and/or after implantation of the device, by non and/or minimally invasive methods of activation and/or acceleration/deceleration, for example optionally including but not limited to thermal heating and cooling, laser beams, and ultrasonic, including focused ultrasound and/or RF (radiofrequency) methods or devices. According to some embodiments of US Patent Publication 20110195123, the site for local delivery may optionally include target sites characterized by high abnormal proliferation of cells, and suppressed apoptosis, including tumors, active and or chronic inflammation and infection including autoimmune diseases states, degenerating tissue including muscle and nervous tissue, chronic pain, degenerative sites, and location of bone fractures and other wound locations for enhancement of regeneration of tissue, and injured cardiac, smooth and striated muscle. The site for implantation of the composition, or target site, preferably features a radius, area and/or volume that is sufficiently small for targeted local delivery. For example, the target site optionally has a diameter in a range of from about 0.1 mm to about 5 cm. The location of the target site is preferably selected for maximum therapeutic efficacy. For example, the composition of the drug delivery system (optionally with a device for implantation as described above) is optionally and preferably implanted within or in the proximity of a tumor environment, or the blood supply associated thereof. For example the composition (optionally with the device) is optionally implanted within or in the proximity to pancreas, prostate, breast, liver, via the nipple, within the vascular system and so forth. The target location is optionally selected from the group consisting of (as non-limiting examples only, as optionally any site within the body may be suitable for implanting a Loder): 1. brain at degenerative sites like in Parkinson or Alzheimer disease at the basal ganglia, white and gray matter; 2. spine as in the case of amyotrophic lateral sclerosis (ALS); 3. uterine cervix to prevent HPV infection; 4. active and chronic inflammatory joints; 5. dermis as in the case of psoriasis; 6. sympathetic and sensoric nervous sites for analgesic effect; 7. Intra osseous implantation; 8. acute and chronic infection sites; 9. Intra vaginal; 10. Inner ear—auditory system, labyrinth of the inner ear, vestibular system; 11. Intra tracheal; 12. Intra-cardiac; coronary, epicardiac; 13. urinary bladder; 14. biliary system; 15. parenchymal tissue including and not limited to the kidney, liver, spleen; 16. lymph nodes; 17. salivary glands; 18. dental gums; 19. Intra-articular (into joints); 20. Intra-ocular; 21. Brain tissue; 22. Brain ventricles; 23. Cavities, including abdominal cavity (for example but without limitation, for ovary cancer); 24. Intra esophageal and 25. Intra rectal. Optionally insertion of the system (for example a device containing the composition) is associated with injection of material to the ECM at the target site and the vicinity of that site to affect local pH and/or temperature and/or other biological factors affecting the diffusion of the drug and/or drug kinetics in the ECM, of the target site and the vicinity of such a site. Optionally, according to some embodiments, the release of said agent could be associated with sensing and/or activation appliances that are operated prior and/or at and/or after insertion, by non and/or minimally invasive and/or else methods of activation and/or acceleration/deceleration, including laser beam, radiation, thermal heating and cooling, and ultrasonic, including focused ultrasound and/or RF (radiofrequency) methods or devices, and chemical activators. According to other embodiments of US Patent Publication 20110195123, the drug preferably comprises a gene silencing biological RNAi drug, for example for localized cancer cases in breast, pancreas, brain, kidney, bladder, lung, and prostate as described below. Although examplifieid with RNAi, many drugs other than siRNA are applicable to be encapsulated in Loder, and can be used in association with this invention, as long as such drugs can be encapsulated with the Loder substrate, such as a matrix for example, and this system may be used and/or adapted to deliver the CRISPR Cas system of the present invention.

[0487] The method of insertion, such as implantation, may optionally already be used for other types of tissue implantation and/or for insertions and/or for sampling tissues, optionally without modifications, or alternatively optionally only with non-major modifications in such methods. Such methods optionally include but are not limited to brachytherapy methods, biopsy, endoscopy with and/or without ultrasound, such as ERCP, stereotactic methods into the brain tissue, Laparoscopy, including implantation with a laparoscope into joints, abdominal organs, the bladder wall and body cavities.

CRISPR Enzyme mRNA and Guide RNA

[0488] CRISPR enzyme mRNA and guide RNA might also be delivered separately. CRISPR enzyme mRNA can be delivered prior to the guide RNA to give time for CRISPR enzyme to be expressed. CRISPR enzyme mRNA might be administered 1-12 hours (preferably around 2-6 hours) prior to the administration of guide RNA. Alternatively, CRISPR enzyme mRNA and guide RNA can be administered together. Advantageously, a second booster dose of guide RNA can be administered 1-12 hours (preferably around 2-6 hours) after the initial administration of CRISPR enzyme mRNA+guide RNA. Additional administrations of CRISPR enzyme mRNA and/or guide RNA might be useful to achieve the most efficient levels of genome modification. For minimization of toxicity and off-target effect, it will be important to control the concentration of CRISPR enzyme mRNA and guide RNA delivered. Optimal concentrations of CRISPR enzyme mRNA and guide RNA can be determined by testing different concentrations in a cellular or animal model and using deep sequencing the analyze the extent of modification at potential off-target genomic loci. For example, for the guide sequence targeting 5′-GAGTCCGAGCAGAAGAAGAA-3′ (SEQ ID NO: 19) in the EMX1 gene of the human genome, deep sequencing can be used to assess the level of modification at the following two off-target loci, 1: 5′-GAGTCCTAGCAGGAGAAGAA-3′ (SEQ ID NO: 20) and 2: 5′-GAGTCTAAGCAGAAGAAGAA-3′ (SEQ ID NO: 21). The concentration that gives the highest level of on-target modification while minimizing the level of off-target modification should be chosen for in vivo delivery. Alternatively, to minimize the level of toxicity and off-target effect, CRISPR enzyme nickase mRNA (for example S. pyogenes Cas9 with the D10A mutation) can be delivered with a pair of guide RNAs targeting a site of interest. The two guide RNAs need to be spaced as follows. Guide sequences in red (single underline) and blue (double underline) respectively (these examples are based on the PAM requirement for Streptococcus pyogenes Cas9).

TABLE 4

| Overhang | |
|---|---|
| length | |
| (bp) | Guide RNA design (guide sequence and PAM color coded) |
| 14 | 5′-NNNNNNNNNNNNNNNNNNNNCCN [symbol] [symbol] N [symbol] NNNNNNNNNNNNNN-3′ |
| | (SEQ ID NO: 38) |
| | 3′-NNNNNNNNNNNNNNNNNNNN [symbol] N [symbol] [symbol] NNCCNNNNNNNNNNNNNN-5′ |
| | (SEQ ID NO: 39) |
| 13 | 5′-NNNNNNNNNNNNNNNNNNNNCC [symbol] [symbol] N [symbol] NNNNNNNNNNNNNNN-3′ |
| | (SEQ ID NO: 40) |
| | 3′-NNNNNNNNNNNNNNNNNNNN [symbol] N [symbol] [symbol] CCNNNNNNNNNNNNNNN-5′ |
| | (SEQ ID NO: 41) |
| 12 | 5′-NNNNNNNNNNNNNNNNNNNNC [symbol] [symbol] N [symbol] NNNNNNNNNNNNNNNN-3′ |
| | (SEQ ID NO: 42) |
| | 3′-NNNNNNNNNNNNNNNNNNNN [symbol] N [symbol] [symbol] CCNNNNNNNNNNNNNNN-5′ |
| | (SEQ ID NO: 43) |
| 11 | 5′-NNNNNNNNNNNNNNNNNNNN [symbol] [symbol] N [symbol] NNNNNNNNNNNNNNNNN-3′ |
| | (SEQ ID NO: 44) |
| | 3′-NNNNNNNNNNNNNNNNNNNN [symbol] N [symbol] [symbol] NNNNNNNNNNNNNNNNN-5′ |
| | (SEQ ID NO: 45) |
| 10 | 5′-NNNNNNNNNNNNNNNNNNN [symbol] [symbol] N [symbol] NNNNNNNNNNNNNNNNNN-3′ |
| | (SEQ ID NO: 46) |
| | 3′-NNNNNNNNNNNNNNNNNNNN [symbol] N [symbol] [symbol] NNNNNNNNNNNNNNNNN-5′ |
| | (SEQ ID NO: 47) |
| 9 | 5′-NNNNNNNNNNNNNNNNNN [symbol] [symbol] N [symbol] NNNNNNNNNNNNNNNNNNN-3′ |
| | (SEQ ID NO: 48) |
| | 3′-NNNNNNNNNNNNNNNNNNNN [symbol] N [symbol] [symbol] NNNNNNNNNNNNNNNNN-5′ |
| | (SEQ ID NO: 49) |
| 8 | 5′-NNNNNNNNNNNNNNNNN [symbol] [symbol] N [symbol] NNNNNNNNNNNNNNNNNNNN-3′ |
| | (SEQ ID NO: 50) |
| | 3′-NNNNNNNNNNNNNNNNNNNN [symbol] N [symbol] [symbol] NNNNNNNNNNNNNNNNN-5′ |
| | (SEQ ID NO: 51) |
| 7 | 5′-NNNNNNNNNNNNNNNN [symbol] [symbol] N [symbol] NNNNNNNNNNNNNNNNNNNNN-3′ |
| | (SEQ ID NO: 52) |
| | 3′-NNNNNNNNNNNNNNNNNNNN [symbol] N [symbol] [symbol] NNNNNNNNNNNNNNNNN-5′ |
| | (SEQ ID NO: 53) |
| 6 | 5′-NNNNNNNNNNNNNNN [symbol] [symbol] N [symbol] NNNNNNNNNNNNNNNNNNNNNN-3′ |
| | (SEQ ID NO: 54) |
| | 3′-NNNNNNNNNNNNNNNNNNNN [symbol] N [symbol] [symbol] NNNNNNNNNNNNNNNNN-5′ |
| | (SEQ ID NO: 55) |
| 5 | 5′-NNNNNNNNNNNNNN [symbol] [symbol] N [symbol] NNNNNNNNNNNNNNNNNNNNNNN-3′ |
| | (SEQ ID NO: 56) |
| | 3′-NNNNNNNNNNNNNNNNNNNN [symbol] N [symbol] [symbol] NNNNNNNNNNNNNNNN-5′ |
| | (SEQ ID NO: 57) |
| 4 | 5′-NNNNNNNNNNNNN [symbol] [symbol] N [symbol] NNNNNNNNNNNNNNNNNNNNNNNN-3′ |
| | (SEQ ID NO: 58) |
| | 3′-NNNNNNNNNNNNNNNNNNNN [symbol] N [symbol] [symbol] NNNNNNNNNNNNNNNNN-5′ |
| | (SEQ ID NO: 59) |
| 3 | 5′-NNNNNNNNNNNN [symbol] [symbol] N [symbol] NNNNNNNNNNNNNNNNNNNNNNNNN-3′ |
| | (SEQ ID NO: 60) |
| | 3′-NNNNNNNNNNNNNNNNNNNN [symbol] N [symbol] [symbol] NNNNNNNNNNNNNNNNN-5′ |
| | (SEQ ID NO: 61) |
| 2 | 5′-NNNNNNNNNNN [symbol] [symbol] N [symbol] NNNNNNNNNNNNNNNNNNNNNNNNNN-3′ |
| | (SEQ ID NO: 62) |
| | 3′-NNNNNNNNNNNNNNNNNNNN [symbol] N [symbol] [symbol] NNNNNNNNNNNNNNNNN-5′ |
| | (SEQ ID NO: 63) |
| 1 | 5′-NNNNNNNNNN [symbol] [symbol] N [symbol] NNNNNNNNNNNNNNNNNNNNNNNNNNN-3′ |
| | (SEQ ID NO: 64) |
| | 3′-NNNNNNNNNNNNNNNNNNNN [symbol] N [symbol] [symbol] NNNNNNNNNNNNNNNNN-5′ |
| | (SEQ ID NO: 65) |
| blunt | 5′-NNNNNNNNN [symbol] [symbol] N [symbol] NNNNNNNNNNNNNNNNNNNNNNNNNNNN-3′ |
| | (SEQ ID NO: 66) |
| | 3′-NNNNNNNNNNNNNNNNNNNN [symbol] N [symbol] [symbol] NNNNNNNNNNNNNNNNN-5′ |
| | (SEQ ID NO: 67) |
| 1 | 5′-NNNNNNNN [symbol] [symbol] N [symbol] NNNNNNNNNNNNNNNNNNNNNNNNNNNNN-3′ |
| | (SEQ ID NO: 68) |
| | 3′-NNNNNNNNNNNNNNNNNNNN [symbol] N [symbol] [symbol] NNNNNNNNNNNNNNNNN-5′ |
| | (SEQ ID NO: 69) |
| 2 | 5′-NNNNNNN [symbol] [symbol] N [symbol] NNNNNNNNNNNNNNNNNNNNNNNNNNNNNN-3′ |
| | (SEQ ID NO: 70) |
| | 3′-NNNNNNNNNNNNNNNNNNNN [symbol] N [symbol] [symbol] NNNNNNNNNNNNNNNNN-5′ |
| | (SEQ ID NO: 71) |
| 3 | 5′-NNNNNN [symbol] [symbol] N [symbol] NNNNNNNNNNNNNNNNNNNNNNNNNNNNNNN-3′ |
| | (SEQ ID NO: 72) |
| | 3′-NNNNNNNNNNNNNNNNNNNN [symbol] GGN [symbol] [symbol] NNNNNNNNNNNNNNNNN-5′ |
| | (SEQ ID NO: 73) |
| 4 | 5′-NNNNN [symbol] [symbol] N [symbol] NNNNNNNNNNNNNNNNNNNNNNNNNNNNNNNN-3′ |
| | (SEQ ID NO: 74) |
| | 3′-NNNNNNNNNNNNNNNNNNNN [symbol] N [symbol] [symbol] NNNNNNNNNNNNNNNNN-5′ |
| | (SEQ ID NO: 75) |
| 5 | 5′-NNNN [symbol] [symbol] N [symbol] NNNNNNNNNNNNNNNNNNNNNNNNNNNNNNNNN-3′ |
| | (SEQ ID NO: 76) |
| | 3′-NNNNNNNNNNNNNNNNNNNN [symbol] N [symbol] [symbol] NNNNNNNNNNNNNNNNN-5′ |
| | (SEQ ID NO: 77) |
| 6 | 5′-NNN [symbol] [symbol] N [symbol] NNNNNNNNNNNNNNNNNNNNNNNNNNNNNNNNNN-3′ |
| | (SEQ ID NO: 78) |
| | 3′-NNNNNNNNNNNNNNNNNNNN [symbol] N [symbol] [symbol] NNNNNNNNNNNNNNNNN-5′ |
| | (SEQ ID NO: 79) |
| 7 | 5′-NN [symbol] [symbol] N [symbol] NNNNNNNNNNNNNNNNNNNNNNNNNNNNNNNNNNN-3′ |
| | (SEQ ID NO: 80) |
| | 3′-NNNNNNNNNNNNNNNNNNNN [symbol] N [symbol] [symbol] NNNNNNNNNNNNNNNNN-5′ |
| | (SEQ ID NO: 81) |
| 8 | 5′-NN [symbol] [symbol] C [symbol] NNNNNNNNNNNNNNNNNNNNNNNNNNNNNNNNNNN-3′ |
| | (SEQ ID NO: 82) |
| | 3′-NNNNNNNNNNNNNNNNNNNNN [symbol] C [symbol] [symbol] NNNNNNNNNNNNNNNNN-5′ |
| | (SEQ ID NO: 83) |
| 12 | 5′-NN [symbol] [symbol] N [symbol] NNNNNNNNNNNNNNNNNNNNNNNNNNNNNNNNNNN-3′ |
| | (SEQ ID NO: 84) |
| | 3′-NNNNNNNNNNNNNNNNNNNNNNNCC [symbol] N [symbol] [symbol] NNNNNNNNNNNNNNNNN-5′ |
| | (SEQ ID NO: 85) |
| 13 | 5′-NN [symbol] [symbol] C [symbol] NNNNNNNNNNNNNNNNNNNNNNNNNNNNNNNNNNN-3′ |
| | (SEQ ID NO: 86) |
| | 3′-NNNNNNNNNNNNNNNNNNNNNNNCCN [symbol] N [symbol] [symbol] NNNNNNNNNNNNNNNNN-5′ |
| | (SEQ ID NO: 87) |
| 14 | 5′-NN [symbol] [symbol] C [symbol] NNNNNNNNNNNNNNNNNNNNNNNNNNNNNNNNNNN-3′ |
| | (SEQ ID NO: 86) |
| | 3′-NNNNNNNNNNNNNNNNNNNNNNNCCNN [symbol] N [symbol] [symbol] NNNNNNNNNN-5′ |
| | (SEQ ID NO: 88) |
| 15 | 5′-NN [symbol] [symbol] C [symbol] NNNNNNNNNNNNNNNNNNNNNNNNNNNNNNNNNNN-3′ |
| | (SEQ ID NO: 86) |
| | 3′-NNNNNNNNNNNNNNNNNNNNNNNCCNNN [symbol] N [symbol] [symbol] NNNNNNNNN-5′ |
| | (SEQ ID NO: 89) |
| 16 | 5′-NN [symbol] [symbol] C [symbol] NNNNNNNNNNNNNNNNNNNNNNNNNNNNNNNNNNN-3′ |
| | (SEQ ID NO: 86) |
| | 3′-NNNNNNNNNNNNNNNNNNNNNNNCCNNNN [symbol] N [symbol] [symbol] NNNNNNNN-5′ |
| | (SEQ ID NO: 90) |
| 17 | 5′-NN [symbol] [symbol] C [symbol] NNNNNNNNNNNNNNNNNNNNNNNNNNNNNNNNNNN-3′ |
| | (SEQ ID NO: 86) |
| | 3′-NNNNNNNNNNNNNNNNNNNNNNNCCNNNNN [symbol] N [symbol] [symbol] NNNNNNN-5′ |
| | (SEQ ID NO: 91) |

[0489] Further interrogation of the system have given Applicants evidence of 5′ overhang (see, e.g., Ran et al., Cell. 2013 Sep. 12; 154 (6): 1380-9 and U.S. Provisional Patent Application Ser. No. 61/871,301 filed Aug. 28, 2013). Applicants have further identified parameters that relate to efficient cleavage by the Cas9 nickase mutant when combined with two guide RNAs and these parameters include but are not limited to the length of 5′ overhang. In embodiments of the invention 5′ overhang is at most 200 base pairs, preferably at most 100 base pairs, or more preferably at most 50 base pairs. In embodiments of the invention 5′ overhang is at least 26 base pairs, preferably at least 30 base pairs or more preferably 34-50 base pairs or 1-34 base pairs. In other preferred methods of the invention the first guide sequence directing cleavage of one strand of the DNA duplex near the first target sequence and the second guide sequence directing cleavage of other strand near the second target sequence results in a blunt cut or a 3′ overhang. In embodiments of the invention 3′ overhang is at most 150, 100 or 25 base pairs or at least 15, 10 or 1 base pairs. In preferred embodiments 3′ overhang is 1-100 basepairs.

[0490] Aspects of the invention relate to the expression of the gene product being decreased or a template polynucleotide being further introduced into the DNA molecule encoding the gene product or an intervening sequence being excised precisely by allowing the two 5′ overhangs to reanneal and ligate or the activity or function of the gene product being altered or the expression of the gene product being increased. In an embodiment of the invention, the gene product is a protein. sgRNA pairs creating 5′ overhangs with less than 8 bp overlap between the guide sequences (offset greater than-8 bp) were able to mediate detectable indel formation. Importantly, each guide used in these assays is able to efficiently induce indels when paired with wildtype Cas9, indicating that the relative positions of the guide pairs are the most important parameters in predicting double nicking activity. Since Cas9n and Cas9H840A nick opposite strands of DNA, substitution of Cas9n with Cas9H840A with a given sgRNA pair should result in the inversion of the overhang type. For example, a pair of sgRNAs that will generate a 5′ overhang with Cas9n should in principle generate the corresponding 3′ overhang instead. Therefore, sgRNA pairs that lead to the generation of a 3′ overhang with Cas9n might be used with Cas9H840A to generate a 5′ overhang. Applicants tested Cas9H840A with a set of sgRNA pairs designed to generate both 5′ and 3′ overhangs (offset range from −278 to +58 bp), but were unable to observe indel formation, indicating that mutation Cas9H840A may substantially reduce Cas9 nuclease activity, thereby making sgRNA pairing as to mutant Cas9H840A as to double nicking of interest.

### Liver, Proprotein Convertase Subtilisin Kexin 9 (PCSK9)

[0491] Bailey et al. (J Mol Med (Berl). 1999 January; 77 (1): 244-9) discloses insulin delivery by ex-vivo somatic cell gene therapy involves the removal of non-B-cell somatic cells (e.g. fibroblasts) from a diabetic patient, and genetically altering them in vitro to produce and secrete insulin. The cells can be grown in culture and returned to the donor as a source of insulin replacement. Cells modified in this way could be evaluated before implantation, and reserve stocks could be cryopreserved. By using the patient's own cells, the procedure should obviate the need for immunosuppression and overcome the problem of tissue supply, while avoiding a recurrence of cell destruction. Ex-vivo somatic cell gene therapy requires an accessible and robust cell type that is amenable to multiple transfections and subject to controlled proliferation. Special problems associated with the use of non-B-cell somatic cells include the processing of proinsulin to insulin, and the conferment of sensitivity to glucose-stimulated proinsulin biosynthesis and regulated insulin release. Preliminary studies using fibroblasts, pituitary cells, kidney (COS) cells and ovarian (CHO) cells suggest that these challenges could be met, and that ex-vivo somatic cell gene therapy offers a feasible approach to insulin replacement therapy. The system of Bailey et al. may be used/and or adapted to the CRISPR Cas system of the present invention for delivery to the liver.

[0492] The methods of Sato et al. (Nature Biotechnology Volume 26 Number 4 Apr. 2008, Pages 431-442) may be applied to the CRISPR Cas system of the present invention for delivery to the liver. Sato et al. found that treatments with the siRNA-bearing vitamin A-coupled liposomes almost completely resolved liver fibrosis and prolonged survival in rats with otherwise lethal dimethylnitrosamine-induced liver cirrhosis in a dose- and duration-dependent manner. Cationic liposomes containing O,O′-ditetradecanoyl-N-(a-(Lipotrust) trimethylammonioacetyl) diethanolamine chloride (DC-6-14) as a cationic lipid, cholesterol and dioleoylphosphatidylethanolamine at a molar ratio of 4:3:3 (which has shown high transfection efficiency under serumcontaining conditions for in vitro and in vivo gene delivery) were purchased from Hokkaido System Science. The liposomes were manufactured using a freeze-dried empty liposomes method and prepared at a concentration of 1 mM (DC-16-4) by addition of double-distilled water (DDW) to the lyophilized lipid mixture under vortexing before use. To prepare VA-coupled liposomes, 200 nmol of vitamin A (retinol, Sigma) dissolved in DMSO was mixed with the liposome suspensions (100 nmol as DC-16-4) by vortexing in a 1.5 ml tube at 25 1 C. To prepare VA-coupled liposomes carrying siRNAgp46 (VA-lip-siRNAgp46), a solution of siRNAgp46 (580 pmol/ml in DDW) was added to the retinol-coupled liposome solution with stirring at 25 C. The ratio of siRNA to DC-16-4 was 1:11.5 (mol/mol) and the siRNA to liposome ratio (wt/wt) was 1:1. Any free vitamin A or siRNA that was not taken up by liposomes were separated from liposomal preparations using a micropartition system (VIVASPIN 2 concentrator 30,000 MWCO PES, VIVASCIENCE). The liposomal suspension was added to the filters and centrifuged at 1,500 g for 5 min 3 times at 25 1 C. Fractions were collected and the material trapped in the filter was reconstituted with PBS to achieve the desired dose for in vitro or in vivo use. Three injections of 0.75 mg/kg siRNA were given every other day to rats. The system of Sato et al. may be used/and or adapted to the CRISPR Cas system of the present invention for delivery to the liver by delivering about 0.5 to 1 mg/kg of CRISPR Cas RNA in the liposomes as described by Sato et al. to humans.

[0493] The methods of Rozema et al. (PNAS, Aug. 7, 2007, vol. 104, no. 32) for a vehicle for the delivery of siRNA to hepatocytes both in vitro and in vivo, which Rozema et al. have named siRNA Dynamic PolyConjugates may also be applied to the present invention. Key features of the Dynamic Poly-Conjugate technology include a membrane-active polymer, the ability to reversibly mask the activity of this polymer until it reaches the acidic environment of endosomes, and the ability to target this modified polymer and its siRNA cargo specifically to hepatocytes in vivo after simple, low-pressure i.v. injection. SATA-modified siRNAs are synthesized by reaction of 5′ aminemodified siRNA with 1 weight equivalents (wt eq) of Nsuccinimidyl-S-acetylthioacetate (SATA) reagent (Pierce) and 0.36 wt eq of NaHCO₃ in water at 4° C. for 16 h. The modified siRNAs are then precipitated by the addition of 9 vol of ethanol and incubation at 80° C. for 2 h. The precipitate is resuspended in 1×siRNA buffer (Dharmacon) and quantified by measuring absorbance at the 260-nm wavelength. PBAVE (30 mg/ml in 5 mM TAPS, pH 9) is modified by addition of 1.5 wt % SMPT (Pierce). After a 1-h incubation, 0.8 mg of SMPT-PBAVE was added to 400 μl of isotonic glucose solution containing 5 mM TAPS (pH 9). To this solution was added 50 μg of SATA-modified siRNA. For the dose-response experiments where [PBAVE] was constant, different amounts of siRNA are added. The mixture is then incubated for 16 h. To the solution is then added 5.6 mg of Hepes free base followed by a mixture of 3.7 mg of CDM-NAG and 1.9 mg of CDM-PEG. The solution is then incubated for at least 1 h at room temperature before injection. CDM-PEG and CDM-NAG are synthesized from the acid chloride generated by using oxalyl chloride. To the acid chloride is added 1.1 molar equivalents polyethylene glycol monomethyl ether (molecular weight average of 450) to generate CDM-PEG or (aminoethoxy) ethoxy-2-(acetylamino)-2-deoxy-β-D-glucopyranoside to generate CDM-NAG. The final product is purified by using reverse-phase HPLC with a 0.1% TFA water/acetonitrile gradient. About 25 to 50 μg of siRNA was delivered to mice. The system of Rozema et al. may be applied to the CRISPR Cas system of the present invention for delivery to the liver, for example by envisioning a dosage of about 50 to about 200 mg of CRISPR Cas for delivery to a human.

### Brain

[0494] Delivery options for the brain include encapsulation of CRISPR enzyme and guide RNA in the form of either DNA or RNA into liposomes and conjugating to molecular Trojan horses for trans-blood brain barrier (BBB) delivery. Molecular Trojan horses have been shown to be effective for delivery of B-gal expression vectors into the brain of non-human primates. The same approach can be used to delivery vectors containing CRISPR enzyme and guide RNA. For instance, Xia C F and Boado R J, Pardridge W M (“Antibody-mediated targeting of siRNA via the human insulin receptor using avidin-biotin technology.” Mol Pharm. 2009 May-June; 6 (3): 747-51. doi: 10.1021/mp800194) describes how delivery of short interfering RNA (siRNA) to cells in culture, and in vivo, is possible with combined use of a receptor-specific monoclonal antibody (mAb) and avidin-biotin technology. The authors also report that because the bond between the targeting mAb and the siRNA is stable with avidin-biotin technology, and RNAi effects at distant sites such as brain are observed in vivo following an intravenous administration of the targeted siRNA.

[0495] Zhang et al. (Mol Ther. 2003 January; 7 (1): 11-8.)) describe how expression plasmids encoding reporters such as luciferase were encapsulated in the interior of an “artificial virus” comprised of an 85 nm pegylated immunoliposome, which was targeted to the rhesus monkey brain in vivo with a monoclonal antibody (MAb) to the human insulin receptor (HIR). The HIRMAb enables the liposome carrying the exogenous gene to undergo transcytosis across the blood-brain barrier and endocytosis across the neuronal plasma membrane following intravenous injection. The level of luciferase gene expression in the brain was 50-fold higher in the rhesus monkey as compared to the rat. Widespread neuronal expression of the beta-galactosidase gene in primate brain was demonstrated by both histochemistry and confocal microscopy. The authors indicate that this approach makes feasible reversible adult transgenics in 24 hours. Accordingly, the use of immunoliposome is preferred. These may be used in conjunction with antibodies to target specific tissues or cell surface proteins. Other means of delivery or RNA are also preferred, such as via nanoparticles (Cho, S., Goldberg, M., Son, S., Xu, Q., Yang, F., Mei, Y., Bogatyrev, S., Langer, R. and Anderson, D., Lipid-like nanoparticles for small interfering RNA delivery to endothelial cells, Advanced Functional Materials, 19:3112-3118, 2010) or exosomes (Schroeder, A., Levins, C., Cortez, C., Langer, R., and Anderson, D., Lipid-based nanotherapeutics for siRNA delivery, Journal of Internal Medicine, 267:9-21, 2010, PMID: 20059641).

[0496] Indeed, exosomes have been shown to be particularly useful in delivery siRNA, a system with some parallels to the CRISPR system. For instance, El-Andaloussi S, et al. (“Exosome-mediated delivery of siRNA in vitro and in vivo.” Nat Protoc. 2012 December; 7 (12): 2112-26. doi: 10.1038/nprot.2012.131. Epub 2012 Nov. 15.) describe how exosomes are promising tools for drug delivery across different biological barriers and can be harnessed for delivery of siRNA in vitro and in vivo. Their approach is to generate targeted exosomes through transfection of an expression vector, comprising an exosomal protein fused with a peptide ligand. The exosomes are then purify and characterized from transfected cell supernatant, then siRNA is loaded into the exosomes. Delivery or administration according to the invention can be performed with exosomes, in particular but not limited to the brain. Vitamin E (α-tocopherol) may be conjugated with CRISPR Cas and delivered to the brain along with high density lipoprotein (HDL), for example in a similar manner as was done by Uno et al. (HUMAN GENE THERAPY 22:711-719 (June 2011)) for delivering short-interfering RNA (siRNA) to the brain. Mice were infused via Osmotic minipumps (model 1007D; Alzet, Cupertino, CA) filled with phosphate-buffered saline (PBS) or free TocsiBACE or Toc-siBACE/HDL and connected with Brain Infusion Kit 3 (Alzet). A brain-infusion cannula was placed about 0.5 mm posterior to the bregma at midline for infusion into the dorsal third ventricle. Uno et al. found that as little as 3 nmol of Toc-siRNA with HDL could induce a target reduction in comparable degree by the same ICV infusion method. A similar dosage of CRISPR Cas conjugated to α-tocopherol and co-administered with HDL targeted to the brain may be contemplated for humans in the present invention, for example, about 3 nmol to about 3 μmol of CRISPR Cas targeted to the brain may be contemplated.

[0497] Zou et al. ((HUMAN GENE THERAPY 22:465-475 (April 2011)) describes a method of lentiviral-mediated delivery of short-hairpin RNAs targeting PKCγ for in vivo gene silencing in the spinal cord of rats. Zou et al. administered about 10 μl of a recombinant lentivirus having a titer of 1×10⁹ transducing units (TU)/ml by an intrathecal catheter. A similar dosage of CRISPR Cas expressed in a lentiviral vector targeted to the brain may be contemplated for humans in the present invention, for example, about 10-50 ml of CRISPR Cas targeted to the brain in a lentivirus having a titer of 1×10⁹ transducing units (TU)/ml may be contemplated.

[0498] In terms of local delivery to the brain, this can be achieved in various ways. For instance, material can be delivered intrastriatally e.g. by injection. Injection can be performed stereotactically via a craniotomy.

### Targeted Deletion, Therapeutic Applications

[0499] Targeted deletion of viral genes or other viral elements is preferred. Examples are exemplified in Example 18. Preferred are, therefore, latent viral genes. As exemplified here, Applicants prefer gene delivery of a CRISPR-Cas system to the liver, brain, ocular, epithelial, hematopoetic, or another tissue of a subject or a patient in need thereof, suffering from latent viral infections, using either viral or nonviral (e.g. nanoparticle) delivery system.

[0500] Therapeutic applications of the CRISPR-Cas system include treatment of viral infections, such as HBV infection.

[0501] Chronic administration of protein therapeutics may elicit unacceptable immune responses to the specific protein. The immunogenicity of protein drugs can be ascribed to a few immunodominant helper T lymphocyte (HTL) epitopes. Reducing the MHC binding affinity of these HTL epitopes contained within these proteins can generate drugs with lower immunogenicity (Tangri S, et al. (“Rationally engineered therapeutic proteins with reduced immunogenicity” J Immunol. 2005 Mar. 15; 174 (6): 3187-96.) In the present invention, the immunogenicity of the CRISPR enzyme in particular may be reduced following the approach first set out in Tangri et al with respect to erythropoietin and subsequently developed. Accordingly, directed evolution or rational design may be used to reduce the immunogenicity of the CRISPR enzyme (for instance a Cas9) in the host species (human or other species).

[0502] Applicants used 3 guideRNAs of interest and able to visualize efficient DNA cleavage in vivo occurring only in a small subset of cells. Essentially, what Applicants have shown here is targeted in vivo cleavage. In particular, this provides proof of concept that specific targeting in higher organisms such as mammals can also be achieved. It also highlights multiplex aspect in that multiple guide sequences (i.e. separate targets) can be used simultaneously (in the sense of co-delivery). In other words, Applicants used a multiple approach, with several different sequences targeted at the same time, but independently.

[0503] A suitable example of a protocol for producing AAV, a preferred vector of the invention is provided in the Examples.

### Blood

[0504] The present invention also contemplates delivering the CRISPR-Cas system to the blood. The plasma exosomes of Wahlgren et al. (Nucleic Acids Research, 2012, Vol. 40, No. 17 e130) were previously described and may be utilized to deliver the CRISPR Cas system to the blood.

### Heart

[0505] The present invention also contemplates delivering the CRISPR-Cas system to the heart. For the heart, a myocardium tropic adena-associated virus (AAVM) is preferred, in particular AAVM41 which showed preferential gene transfer in the heart (see, e.g., Lin-Yanga et al., PNAS, Mar. 10, 2009, vol. 106, no. 10). Administration may be systemic or local. A dosage of about 1-10×10¹⁴ vector genomes are contemplated for systemic administration. See also, e.g., Eulalio et al. (2012) Nature 492:376 and Somasuntharam et al. (2013) Biomaterials 34:7790.

### Kidneys

[0506] The present invention also contemplates delivering the CRISPR-Cas system to the kidney. Delivery strategies to induce cellular uptake of the therapeutic nucleic acid include physical force or vector systems such as viral-, lipid- or complex-based delivery, or nanocarriers. From the initial applications with less possible clinical relevance, when nucleic acids were addressed to renal cells with hydrodynamic high pressure injection systemically, a wide range of gene therapeutic viral and non-viral carriers have been applied already to target posttranscriptional events in different animal kidney disease models in vivo (Csaba Révész and Péter Hamar (2011). Delivery Methods to Target RNAs in the Kidney, Gene Therapy Applications, Prof. Chunsheng Kang (Ed.), ISBN: 978-953-307-541-9, InTech, Available from: (www.intechopen.com/books/gene-therapy-applications/delivery-methods-to-target-rnas-in-the-kidney). Delivery methods to the kidney are summarized as follows:

| Delivery | | Target | | | Functional | |
|---|---|---|---|---|---|---|
| method | Carrier | RNA | Disease | Model | assays | Author |
| Hydro- | TransIT | p85α | Acute | Ischemia- | Uptake, | Larson et al., |
| dynamic/ | In Vivo | | renal | reperfusion | biodistribution | Surgery, |
| Lipid | Gene | | injury | | | (August 2007), |
| | Delivery | | | | | Vol. 142, |
| | System, | | | | | No. 2, pp. |
| | DOTAP | | | | | (262-269) |
| Hydro- | Lipo- | Fas | Acute | Ischemia- | Blood urea | Hamar et al., |
| dynamic/ | fectamine | | renal | reperfusion | nitrogen, | Proc Natl |
| Lipid | 2000 | | injury | | Fas Immuno- | Acad Sci. |
| | | | | | histochemistry, | (October 2004), |
| | | | | | apoptosis, | Vol. 101, |
| | | | | | histological | No. 41, pp. |
| | | | | | scoring | (14883-14888) |
| Hydro- | n.a. | Apoptosis | Acute | Ischemia- | n.a. | Zheng et al., |
| dynamic | | cascade | renal | reperfusion | | Am J Pathol, |
| | | elements | injury | | | (October 2008), |
| | | | | | | Vol. 173, |
| | | | | | | No. 4, pp. |
| | | | | | | (973-980) |
| Hydro- | n.a. | Nuclear | Acute | Ischemia- | n.a. | Feng et al., |
| dynamic | | factor | renal | reperfusion | | Transplantation, |
| | | kappa-b | injury | | | (May 2009), |
| | | (NFkB) | | | | Vol. 87, |
| | | | | | | No. 9, pp. |
| | | | | | | (1283-1289) |
| Hydro- | Lipo- | Apoptosis | Acute | Ischemia- | Apoptosis, | Xie & Guo, Am |
| dynamic/ | fectamine | antagonizing | renal | reperfusion | oxidative stress, | Soc Nephrol, |
| Viral | 2000 | transcription | injury | | caspase | (December 2006), |
| | | factor | | | activation, | Vol. 17, |
| | | (AATF) | | | membrane lipid | No. 12, pp. |
| | | | | | peroxidation | (3336-3346) |
| Hydro- | pBAsi mU6 | Gremlin | Diabetic | Strep- | Proteinuria, | Q. Zhang et al., |
| dynamic | Neo/TransIT- | | nephro- | tozotozin- | serum creatinine, | PloS ONE, |
| | EE Hydro- | | pathy | induced | glomerular and | (July 2010), |
| | dynamic | | | diabetes | tubular diameter, | Vol. 5, No. 7, |
| | Delivery | | | | collagen type | e11709, pp. |
| | System | | | | IV/BMP7 | (1-13) |
| | | | | | expression | |
| Viral/ | pSUPER | TGF-β | Interstitial | Unilateral | α-SMA | Kushibikia et al., |
| Lipid | vector/Lipo- | type II | renal | urethral | expression, | J Controlled |
| | fectamine | receptor | fibrosis | obstruction | collagen | Release, |
| | | | | | content. | (July 2005), |
| | | | | | | Vol. 105, |
| | | | | | | No. 3, pp. |
| | | | | | | (318-331) |
| Viral | Adeno- | Mineral | Hyper- | Cold- | blood pressure, | Wang et al., Gene |
| | associated | corticoid | tension | induced | serum albumin, | Therapy, |
| | virus-2 | receptor | caused | hypertension | serum urea | (July 2006), |
| | | | renal | | nitrogen, serum | Vol. 13, |
| | | | damage | | creatinine, | No. 14, pp. |
| | | | | | kidney weight, | (1097-1103) |
| | | | | | urinary sodium | |
| Hydro- | pU6 vector | Lucifcrase | n.a. | n.a. | uptake | Kobayashi et al., |
| dynamic/ | | | | | | Journal of |
| Viral | | | | | | Pharmacology and |
| | | | | | | Experimental |
| | | | | | | Therapeutics, |
| | | | | | | (February 2004), |
| | | | | | | Vol. 308, |
| | | | | | | No. 2, pp. |
| | | | | | | (688-693) |
| Lipid | Lipoproteins, | apoB1, | n.a. | n.a. | Uptake, | Wolfrum et al., |
| | albumin | apoM | | | binding | Nature Bio- |
| | | | | | affinity to | technology, |
| | | | | | lipoproteins | (September 2007), |
| | | | | | and albumin | Vol. 25, |
| | | | | | | No. 10, pp. |
| | | | | | | (1149-1157) |
| Lipid | Lipo- | p53 | Acute | Ischemic | Histological | Molitoris etal., J |
| | fectamine2000 | | renal | and cisplatin- | scoring, | Am Soc Nephrol, |
| | | | injury | induccd | apoptosis | (August 2009), |
| | | | | acute | | Vol. 20, |
| | | | | injury | | No. 8, pp. |
| | | | | | | (1754-1764) |
| Lipid | DOTAP/ | COX-2 | Breast | MDA-MB- | Cell viability, | Mikhaylova et al., |
| | DOPE, | | adeno- | 231 breast | uptake | Cancer Gene |
| | DOTAP/ | | carcinoma | cancer | | Therapy |
| | DOPE/ | | | xenograft- | | (March 2011), |
| | DOPE- | | | bearing | | Vol. 16, |
| | PEG2000 | | | mouse | | No. 3, pp. |
| | | | | | | (217-226) |
| Lipid | Cholesterol | 12/15- | Diabetic | Strep- | Albuminuria, | Yuan et al., Am |
| | | lipoxygenase | nephro- | tozotocin- | urinary creatinine, | J Physiol Renal |
| | | | pathy | induced | histology, type I | Physiol |
| | | | | diabetes | and IV collagen, | (June 2008), |
| | | | | | TGF-β, fibronectin, | Vol. 295, pp. |
| | | | | | plasminogen | (F605-F617) |
| | | | | | activator inhibitor 1 | |
| Lipid | Lipo- | Mitochondrial | Diabetic | Strep- | Cell proliferation | Y. Zhang et al., |
| | fectamine | membrane | nephro- | tozotocin- | and apoptosis, | J Am Soc |
| | 2000 | 44 (TIM44) | pathy | induced | histology, ROS, | Nephrol, |
| | | | | diabetes | mitochondrial | (April 2006), |
| | | | | | import of Mn- | Vol. 17, |
| | | | | | SOD and | No. 4, pp. |
| | | | | | glutathione | (1090-1101) |
| | | | | | peroxidase, | |
| | | | | | cellular | |
| | | | | | membrane | |
| | | | | | polarization | |
| Hydro- | Proteolipo- | RLIP76 | Renal | Caki-2 | uptake | Singhal et al., |
| dynamic/ | some | | carcinoma | kidney | | Cancer Res, |
| Lipid | | | | cancer | | (May 2009), |
| | | | | xenograft- | | Vol. 69, |
| | | | | bearing | | No. 10, pp. |
| | | | | mouse | | (4244-4251) |
| Polymer | PEGylatcd | Luciferase | n.a. | n.a. | Uptake, | Malek et al., |
| | PEI | pGL3 | | | biodistribution, | Toxicology |
| | | | | | erythrocyte | and Applied |
| | | | | | aggregation | Pharmacology, |
| | | | | | | (April 2009), |
| | | | | | | Vol. 236, |
| | | | | | | No. 1, pp. |
| | | | | | | (97-108) |
| Polymer | PEGylated | MAPK1 | Lupus | Glomerulo- | Proteinuria, | Shimizu et al. |
| | poly-L- | | glomerulo- | nephritis | glomerulosclerosis, | J Am Soc |
| | lysine | | nephritis | | TGF-β fibronectin, | Nephrology, |
| | | | | | plasminogen | (April 2010), |
| | | | | | activator | Vol. 21, |
| | | | | | inhibitor 1 | No. 4, pp. |
| | | | | | | (622-633) |
| Polymer/ | Hyaluronic | VEGF | Kidney | B16F1 | Biodistribution, | Jiang et al, |
| Nano | acid/ | | cancer/ | melanoma | citotoxicity, | Molecular |
| particle | Quantum | | melanoma | tumor- | tumor volume, | Pharmaceutics, |
| | dot/PEI | | | bearing | endocytosis | (May-June 2009), |
| | | | | mouse | | Vol. 6, |
| | | | | | | No. 3, pp. |
| | | | | | | (727-737) |
| Polymer/ | PEGylated | GAPDH | n.a. | n.a. | cell viability, | Cao et al, J |
| Nano | polycapro- | | | | uptake | Controlled |
| particle | lactone | | | | | Release, |
| | nanofiber | | | | | (June 2010). |
| | | | | | | Vol. 144, |
| | | | | | | No. 2, pp. |
| | | | | | | (203-212) |
| Aptamer | Spiegelmer | CC | Glomerulo | Unine- | urinary albumin, | Ninichuk et al., |
| | mNOX-E36 | chemokine | sclerosis | phrecto- | urinary creatinine, | Am J Pathol, |
| | | ligand 2 | | mized | histopathology, | (March 2008), |
| | | | | mouse | glomerular filtration | Vol. 172, |
| | | | | | rate, macrophage | No. 3, pp. |
| | | | | | count, serum Ccl2. | (628-637) |
| | | | | | Mac-2+, Ki-67+ | |
| Aptamer | Aptamer | vasopressin | Congestive | n.a. | Binding affinity | Purschke et al., |
| | NOX-F37 | (AVP) | heart | | to D-AVP, | Proc Natl |
| | | | failure | | Inhibition of | Acad Sci, |
| | | | | | AVP Signaling, | (March 2006), |
| | | | | | Urine osmolality | Vol. 103, |
| | | | | | and sodium | No. 13, pp. |
| | | | | | concentration, | (5173-5178) |

### Lungs

[0507] The present invention also contemplates delivering the CRISPR-Cas system to one or both lungs. Although AAV-2-based vectors were originally proposed for CFTR delivery to CF airways, other serotypes such as AAV-1, AAV-5, AAV-6, and AAV-9 exhibit improved gene transfer efficiency in a variety of models of the lung epithelium (see, e.g., Li et al., Molecular Therapy, vol. 17 no. 12, 2067-277 December 2009). AAV-1 was demonstrated to be ˜100-fold more efficient than AAV-2 and AAV-5 at transducing human airway epithelial cells in vitro, 5 although AAV-1 transduced murine tracheal airway epithelia in vivo with an efficiency equal to that of AAV-5. Other studies have shown that AAV-5 is 50-fold more efficient than AAV-2 at gene delivery to human airway epithelium (HAE) in vitro and significantly more efficient in the mouse lung airway epithelium in vivo. AAV-6 has also been shown to be more efficient than AAV-2 in human airway epithelial cells in vitro and murine airways in vivo. 8 The more recent isolate, AAV-9, was shown to display greater gene transfer efficiency than AAV-5 in murine nasal and alveolar epithelia in vivo with gene expression detected for over 9 months suggesting AAV may enable long-term gene expression in vivo, a desirable property for a CFTR gene delivery vector. Furthermore, it was demonstrated that AAV-9 could be readministered to the murine lung with no loss of CFTR expression and minimal immune consequences. CF and non-CF HAE cultures may be inoculated on the apical surface with 100 μl of AAV vectors for hours (see, e.g., Li et al., Molecular Therapy, vol. 17 no. 12, 2067-277 December 2009). The MOI may vary from 1×10³ to 4×10⁵ vector genomes/cell, depending on virus concentration and purposes of the experiments. The above cited vectors are contemplated for the delivery and/or administration of the invention.

[0508] Zamora et al. (Am J Respir Crit Care Med Vol 183. pp 531-538, 2011) reported an example of the application of an RNA interference therapeutic to the treatment of human infectious disease and also a randomized trial of an antiviral drug in respiratory syncytial virus (RSV)-infected lung transplant recipients. Zamora et al. performed a randomized, double-blind, placebo controlled trial in LTX recipients with RSV respiratory tract infection. Patients were permitted to receive standard of care for RSV. Aerosolized ALN-RSV01 (0.6 mg/kg) or placebo was administered daily for 3 days. This study demonstrates that an RNAi therapeutic targeting RSV can be safely administered to LTX recipients with RSV infection. Three daily doses of ALN-RSV01 did not result in any exacerbation of respiratory tract symptoms or impairment of lung function and did not exhibit any systemic proinflammatory effects, such as induction of cytokines or CRP. Pharmacokinetics showed only low, transient systemic exposure after inhalation, consistent with preclinical animal data showing that ALN-RSV01, administered intravenously or by inhalation, is rapidly cleared from the circulation through exonuclease mediated digestion and renal excretion. The method of Zamora et al. may be applied to the CRISPR Cas system of the present invention and an aerosolized CRISPR Cas, for example with a dosage of 0.6 mg/kg, may be contemplated for the present invention.

### Muscles

[0509] The present invention also contemplates delivering the CRISPR-Cas system to muscle(s).

### Skin

[0510] The present invention also contemplates delivering the CRISPR-Cas system to the skin. Hickerson et al. (Molecular Therapy-Nucleic Acids (2013) 2, e129) relates to a motorized microneedle array skin delivery device for delivering self-delivery (sd)-siRNA to human and murine skin. The primary challenge to translating siRNA-based skin therapeutics to the clinic is the development of effective delivery systems. Substantial effort has been invested in a variety of skin delivery technologies with limited success. In a clinical study in which skin was treated with siRNA, the exquisite pain associated with the hypodermic needle injection precluded enrollment of additional patients in the trial, highlighting the need for improved, more “patient-friendly” (i.e., little or no pain) delivery approaches. Microneedles represent an efficient way to deliver large charged cargos including siRNAs across the primary barrier, the stratum corneum, and are generally regarded as less painful than conventional hypodermic needles. Motorized “stamp type” microneedle devices, including the motorized microneedle array (MMNA) device used by Hickerson et al., have been shown to be safe in hairless mice studies and cause little or no pain as evidenced by (i) widespread use in the cosmetic industry and (ii) limited testing in which nearly all volunteers found use of the device to be much less painful than a flushot, suggesting siRNA delivery using this device will result in much less pain than was experienced in the previous clinical trial using hypodermic needle injections. The MMNA device (marketed as Triple-M or Tri-M by Bomtech Electronic Co, Seoul, South Korea) was adapted for delivery of siRNA to mouse and human skin. sd-siRNA solution (up to 300 ul of 0.1 mg/ml RNA) was introduced into the chamber of the disposable Tri-M needle cartridge (Bomtech), which was set to a depth of 0.1 mm. For treating human skin, deidentified skin (obtained immediately following surgical procedures) was manually stretched and pinned to a cork platform before treatment. All intradermal injections were performed using an insulin syringe with a 28-gauge 0.5-inch needle. The MMNA device and method of Hickerson et al. could be used and/or adapted to deliver the CRISPR Cas of the present invention, for example, at a dosage of up to 300 μl of 0.1 mg/ml CRISPR Cas to the skin.

### Latent and Chronic Viral Infections

[0511] The present invention may also be applied to treat latent or chronic viral infections. Viral latency is the ability of a pathogenic virus to remain latent or dormant within a cell during the lysogenic part of its life cycle. Latent infection is distinct from chronic infection in which a virus continues to replicate and proliferate. Instead, proliferation of the virus ceases but the viral genome is not eradicated, and so it can reactivate and again result in production of viral progeny (lytic part of the life cycle) without requiring reinfection of the host. Thus the invention provides the use of a CRISPR-Cas system to inactivate a virus within a eukaryotic cell, and in particular a latent form of the virus. For instance, the CRISPR-Cas system can be used to excise an integrated provirus from a cell's genome and/or to inactivate a latent virus which is present in episomal form (e.g. to cleave a cccDNA form).

[0512] Thus the invention provides a CRISPR-Cas system comprising one or more vectors for delivery to a eukaryotic cell, wherein the vector(s) encode(s): (i) a CRISPR enzyme; (ii) a guide RNA capable of hybridizing to a target sequence in a viral genome within the cell; and (iii); a tracr mate sequence; and (iv) a tracr sequence, wherein, when expressed within the cell, the guide RNA directs sequence-specific binding of a CRISPR complex to the target sequence, and the CRISPR complex comprises (a) the tracr mate sequence hybridised to the tracr sequence and (b) a CRISPR enzyme bound to the guide RNA, such that the guide RNA can hybridise to its target sequence in the viral genome.

[0513] Further characteristics of the vector(s), the encoded enzyme, the guide sequences, etc. are disclosed elsewhere herein. For instance, the guide sequences can be part of a chiRNA sequence which provides the guide, tracr mate and tracr sequences within a single RNA, such that the system can encode (i) a CRISPR enzyme; (ii) a chiRNA comprising a sequence capable of hybridizing to a target sequence in a viral genome, a tracr mate sequence, and a tracr sequence. Similarly, the enzyme can include one or more NLS, etc.

[0514] Latent viruses can exist in episomal form or integrated proviral form, and the invention can be used to treat both types. The invention is particularly useful with DNA viruses, and especially viruses with a double-stranded DNA genome. Examples of pathogenic DNA viruses which have an episomal latent form herpes simplex virus (HSV) 1 and 2, human papillomavirus (HPV) of any type, Epstein Barr virus (EBV), and varicella zoster virus (VZV). The invention can be used to treat infections with any of these viruses. Some plant viruses also exhibit a latent form and the invention can be used to eliminate these as well. CRISPR systems of the invention can be targeted to cell types which maintain a latent virus e.g. B cells or epithelial cells for EBV, neurons for HSV and VZV, epithelial cells for HPV, liver cells for HBV, etc. Genomic sequences for viruses are widely available, and guide sequences for targeting the viral genome can thus be designed without difficulty. Where a virus has various sequence variants (e.g. different subtypes of HBV) it is useful to design guide sequences to target regions of the genome which are conserved, thereby providing broad activity. It is preferred to use guide RNAs against more than one site in the viral genome. A key advantage of CRISPR technology when compared to ZFNs or TALENs is the relative ease by which multiple sequences can be targeted. Targeting multiple sites in a viral genome offers two main advantages. Firstly, it reduces the possibility that a viral strain might escape (e.g. by mutation), and helps to ensure that at least one target is present in any subject's unique ensemble of genomes and variants or quasispecies. Secondly, because episomeal forms are generally small and circular (˜3-4 kb), targeting multiple sites with different guides may allow fragmentation of the episome into multiple pieces that cannot easily be repaired by NHEJ. Thus, for example, a CRISPR system can target multiple genes or ORFs within a viral genome. As well as targeting latent viruses, CRISPR systems can be used to target chronic viral infections by viruses whose life cycles include a dsDNA form which can be bound by CRISPR complexes. In these embodiments the CRISPR system can be used in conjunction with an antiviral compound, such as tenofovir (HBV), entecavir (HBV), aciclovir (HSV, VZV), etc.

### Hepatitis Viruses

[0515] The present invention may also be applied to treat hepatitis B virus (HBV). Thus the invention provides the use of a CRISPR-Cas system to inactivate HBV within a mammalian cell, and in particular a latent form of HBV. For instance, the CRISPR-Cas system can be used to excise integrated HBV provirus from a cell's genome (a rare occurrence) and/or to inactivate latent HBV which is present in covalently closed circular DNA (cccDNA) form. HBV genomic sequences are widely available, and guide sequences for targeting the HBV genome can thus be designed without difficulty. HBV exists in several serological subtypes (e.g. adw, ayw, ady, adr), which differ by >8% in primary sequence, and it is useful to design guide sequences to target regions of the genome which are conserved between multiple subtypes. Applicants have designed 24 guide RNAs to target the HBV genome. These include targets which are highly conserved within the HBV genome; and the location of 9 of these guide sequences is mapped against the HBV genome (See FIGS. 36, 57). It is preferred to use guide RNAs against more than one site in the HBV genome. For instance, it is useful to provide guide sequences which recognise two or more of: ORF S, which encodes the surface antigen; ORF C, which encodes core protein; ORF P, which encodes the polymerase; ORF X, which encodes HBX protein; the EnhI enhancer regulatory element; and/or the EnhII enhancer regulatory element. CRISPR systems for treating HBV are ideally delivered to liver cells, and in particular to hepatocytes. Thus an AAV8 vector may be useful. Similarly, expression of the components of the CRISPR system are ideally under the transcriptional control of a liver-specific or hepatocyte-specific promoter.

[0516] The CRISPR system can be used in conjunction with an anti-HBV compound such as tenofovir or entecavir. As Cas9 targeting to cccDNA is likely at least partially dependent on the cccDNA structure, co-treatment with epigenetic modifiers (for example Class I and Class III HDAC inhibitors trichostatin A (TSA), valproate, and nicotinamide (NAM), and Type I interferons) may be useful for increasing Cas9 occupancy on HBV cccDNA. For treating HBV in practice, the CRISPR Cas system must avoid the shortcomings of RNAi, such as the risk of oversaturating endogenous small RNA pathways, by for example, optimizing dose and sequence (see, e.g., Grimm et al., Nature vol. 441, 26 May 2006). For example, low doses, such as about 1-10×10¹⁴ particles per human are contemplated. In another embodiment, the CRISPR Cas system directed against HBV may be administered in liposomes, such as a stable nucleic-acid-lipid particle (SNALP) (see, e.g., Morrissey et al., Nature Biotechnology, Vol. 23, No. 8, August 2005). Daily intravenous injections of about 1, 3 or 5 mg/kg/day of CRISPR Cas targeted to HBV RNA in a SNALP are contemplated. The daily treatment may be over about three days and then weekly for about five weeks. In another embodiment, the system of Chen et al. (Gene Therapy (2007) 14, 11-19) may be used/and or adapted for the CRISPR Cas system of the present invention. Chen et al. use a double-stranded adenoassociated virus 8-pseudotyped vector (dsAAV2/8) to deliver shRNA. A single administration of dsAAV2/8 vector (1×10¹² vector genomes per mouse), carrying HBV-specific shRNA, effectively suppressed the steady level of HBV protein, mRNA and replicative DNA in liver of HBV transgenic mice, leading to up to 2-3 log₁₀ decrease in HBV load in the circulation. Significant HBV suppression sustained for at least 120 days after vector administration. The therapeutic effect of shRNA was target sequence dependent and did not involve activation of interferon. For the present invention, a CRISPR Cas system directed to HBV may be cloned into an AAV vector, such as a dsAAV2/8 vector and administered to a human, for example, at a dosage of about 1×10¹⁵ vector genomes to about 1×10¹⁶ vector genomes per human. In another embodiment, the method of Wooddell et al. (Molecular Therapy vol. 21 no. 5, 973-985 May 2013) may be used/and or adapted to the CRISPR Cas system of the present invention. Woodell et al. show that simple coinjection of a hepatocyte-targeted, N-acetylgalactosamine-conjugated melittin-like peptide (NAG-MLP) with a liver-tropic cholesterol-conjugated siRNA (chol-siRNA) targeting coagulation factor VII (F7) results in efficient F7 knockdown in mice and nonhuman primates without changes in clinical chemistry or induction of cytokines. Using transient and transgenic mouse models of HBV infection, Wooddell et al. show that a single coinjection of NAG-MLP with potent chol-siRNAs targeting conserved HBV sequences resulted in multilog repression of viral RNA, proteins, and viral DNA with long duration of effect. Intravenous coinjections, for example, of about 6 mg/kg of NAG-MLP and 6 mg/kg of HBV specific CRISPR Cas may be envisioned for the present invention. In the alternative, about 3 mg/kg of NAG-MLP and 3 mg/kg of HBV specific CRISPR Cas may be delivered on day one, followed by administration of about 2-3 mg/kg of NAG-MLP and 2-3 mg/kg of HBV specific CRISPR Cas two weeks later.

[0517] The present invention may also be applied to treat hepatitis C virus (HCV). The methods of Roelvinki et al. (Molecular Therapy vol. 20 no. 9, 1737-1749 September 2012) may be applied to the CRISPR Cas system. For example, an AAV vector such as AAV8 may be a contemplated vector and for example a dosage of about 1.25× 10¹¹ to 1.25× 10¹³ vector genomes per kilogram body weight (vg/kg) may be contemplated.

[0518] It will be readily apparent that a host of other viruses can be treated in a similar fashion.

### Nucleic Acids, Amino Acids and Proteins

[0519] The invention uses nucleic acids to bind target DNA sequences. This is advantageous as nucleic acids are much easier and cheaper to produce than proteins, and the specificity can be varied according to the length of the stretch where homology is sought. Complex 3-D positioning of multiple fingers, for example is not required. The terms “polynucleotide”, “nucleotide”, “nucleotide sequence”, “nucleic acid” and “oligonucleotide” are used interchangeably. They refer to a polymeric form of nucleotides of any length, either deoxyribonucleotides or ribonucleotides, or analogs thereof. Polynucleotides may have any three dimensional structure, and may perform any function, known or unknown. The following are non-limiting examples of polynucleotides: coding or non-coding regions of a gene or gene fragment, loci (locus) defined from linkage analysis, exons, introns, messenger RNA (mRNA), transfer RNA, ribosomal RNA, short interfering RNA (siRNA), short-hairpin RNA (shRNA), micro-RNA (miRNA), ribozymes, cDNA, recombinant polynucleotides, branched polynucleotides, plasmids, vectors, isolated DNA of any sequence, isolated RNA of any sequence, nucleic acid probes, and primers. The term also encompasses nucleic-acid-like structures with synthetic backbones, see, e.g., Eckstein, 1991; Baserga et al., 1992; Milligan, 1993; WO 97/03211; WO 96/39154; Mata, 1997; Strauss-Soukup, 1997; and Samstag, 1996. A polynucleotide may comprise one or more modified nucleotides, such as methylated nucleotides and nucleotide analogs. If present, modifications to the nucleotide structure may be imparted before or after assembly of the polymer. The sequence of nucleotides may be interrupted by non-nucleotide components. A polynucleotide may be further modified after polymerization, such as by conjugation with a labeling component.

[0520] As used herein the term “wild type” is a term of the art understood by skilled persons and means the typical form of an organism, strain, gene or characteristic as it occurs in nature as distinguished from mutant or variant forms.

[0521] As used herein the term “variant” should be taken to mean the exhibition of qualities that have a pattern that deviates from what occurs in nature.

[0522] The terms “non-naturally occurring” or “engineered” are used interchangeably and indicate the involvement of the hand of man. The terms, when referring to nucleic acid molecules or polypeptides mean that the nucleic acid molecule or the polypeptide is at least substantially free from at least one other component with which they are naturally associated in nature and as found in nature.

[0523] “Complementarity” refers to the ability of a nucleic acid to form hydrogen bond(s) with another nucleic acid sequence by either traditional Watson-Crick base pairing or other non-traditional types. A percent complementarity indicates the percentage of residues in a nucleic acid molecule which can form hydrogen bonds (e.g., Watson-Crick base pairing) with a second nucleic acid sequence (e.g., 5, 6, 7, 8, 9, 10 out of 10 being 50%, 60%, 70%, 80%, 90%, and 100% complementary). “Perfectly complementary” means that all the contiguous residues of a nucleic acid sequence will hydrogen bond with the same number of contiguous residues in a second nucleic acid sequence. “Substantially complementary” as used herein refers to a degree of complementarity that is at least 60%, 65%, 70%, 75%, 80%, 85%, 90%, 95%, 97%, 98%, 99%, or 100% over a region of 8, 9, 10, 11, 12, 13, 14, 15, 16, 17, 18, 19, 20, 21, 22, 23, 24, 25, 30, 35, 40, 45, 50, or more nucleotides, or refers to two nucleic acids that hybridize under stringent conditions.

[0524] As used herein, “stringent conditions” for hybridization refer to conditions under which a nucleic acid having complementarity to a target sequence predominantly hybridizes with the target sequence, and substantially does not hybridize to non-target sequences. Stringent conditions are generally sequence-dependent, and vary depending on a number of factors. In general, the longer the sequence, the higher the temperature at which the sequence specifically hybridizes to its target sequence. Non-limiting examples of stringent conditions are described in detail in Tijssen (1993), Laboratory Techniques In Biochemistry And Molecular Biology-Hybridization With Nucleic Acid Probes Part I, Second Chapter “Overview of principles of hybridization and the strategy of nucleic acid probe assay”, Elsevier, N.Y. Where reference is made to a polynucleotide sequence, then complementary or partially complementary sequences are also envisaged. These are preferably capable of hybridising to the reference sequence under highly stringent conditions. Generally, in order to maximize the hybridization rate, relatively low-stringency hybridization conditions are selected: about 20 to 25° C. lower than the thermal melting point (Tₘ). The Tₘ is the temperature at which 50% of specific target sequence hybridizes to a perfectly complementary probe in solution at a defined ionic strength and pH. Generally, in order to require at least about 85% nucleotide complementarity of hybridized or hybridizable sequences, highly stringent washing conditions are selected to be about 5 to 15° C. lower than the Tₘ. In order to require at least about 70% nucleotide complementarity of hybridized or hybridizable sequences, moderately-stringent washing conditions are selected to be about 15 to 30° C. lower than the Tₘ. Highly permissive (very low stringency) washing conditions may be as low as 50° C. below the Tₘ, allowing a high level of mis-matching between hybridized or hybridizable sequences. Those skilled in the art will recognize that other physical and chemical parameters in the hybridization and wash stages can also be altered to affect the outcome of a detectable hybridization signal from a specific level of homology between target and probe sequences. Preferred highly stringent conditions comprise incubation in 50% formamide, 5×SSC, and 1% SDS at 42° C., or incubation in 5×SSC and 1% SDS at 65° C., with wash in 0.2×SSC and 0.1% SDS at 65° C.

[0525] “Hybridization” refers to a reaction in which one or more polynucleotides react to form a complex that is stabilized via hydrogen bonding between the bases of the nucleotide residues. The hydrogen bonding may occur by Watson Crick base pairing, Hoogstein binding, or in any other sequence specific manner. The complex may comprise two strands forming a duplex structure, three or more strands forming a multi stranded complex, a single self-hybridizing strand, or any combination of these. A hybridization reaction may constitute a step in a more extensive process, such as the initiation of PCR, or the cleavage of a polynucleotide by an enzyme. A sequence capable of hybridizing with a given sequence is referred to as the “complement” of the given sequence.

[0526] As used herein, the term “genomic locus” or “locus” (plural loci) is the specific location of a gene or DNA sequence on a chromosome. A “gene” refers to stretches of DNA or RNA that encode a polypeptide or an RNA chain that has functional role to play in an organism and hence is the molecular unit of heredity in living organisms. For the purpose of this invention it may be considered that genes include regions which regulate the production of the gene product, whether or not such regulatory sequences are adjacent to coding and/or transcribed sequences. Accordingly, a gene includes, but is not necessarily limited to, promoter sequences, terminators, translational regulatory sequences such as ribosome binding sites and internal ribosome entry sites, enhancers, silencers, insulators, boundary elements, replication origins, matrix attachment sites and locus control regions.

[0527] As used herein, “expression of a genomic locus” or “gene expression” is the process by which information from a gene is used in the synthesis of a functional gene product. The products of gene expression are often proteins, but in non-protein coding genes such as rRNA genes or tRNA genes, the product is functional RNA. The process of gene expression is used by all known life-eukaryotes (including multicellular organisms), prokaryotes (bacteria and archaea) and viruses to generate functional products to survive. As used herein “expression” of a gene or nucleic acid encompasses not only cellular gene expression, but also the transcription and translation of nucleic acid(s) in cloning systems and in any other context. As used herein, “expression” also refers to the process by which a polynucleotide is transcribed from a DNA template (such as into and mRNA or other RNA transcript) and/or the process by which a transcribed mRNA is subsequently translated into peptides, polypeptides, or proteins. Transcripts and encoded polypeptides may be collectively referred to as “gene product.” If the polynucleotide is derived from genomic DNA, expression may include splicing of the mRNA in a eukaryotic cell.

[0528] The terms “polypeptide”, “peptide” and “protein” are used interchangeably herein to refer to polymers of amino acids of any length. The polymer may be linear or branched, it may comprise modified amino acids, and it may be interrupted by non amino acids. The terms also encompass an amino acid polymer that has been modified; for example, disulfide bond formation, glycosylation, lipidation, acetylation, phosphorylation, or any other manipulation, such as conjugation with a labeling component. As used herein the term “amino acid” includes natural and/or unnatural or synthetic amino acids, including glycine and both the D or L optical isomers, and amino acid analogs and peptidomimetics.

[0529] As used herein, the term “domain” or “protein domain” refers to a part of a protein sequence that may exist and function independently of the rest of the protein chain.

[0530] As described in aspects of the invention, sequence identity is related to sequence homology. Homology comparisons may be conducted by eye, or more usually, with the aid of readily available sequence comparison programs. These commercially available computer programs may calculate percent (%) homology between two or more sequences and may also calculate the sequence identity shared by two or more amino acid or nucleic acid sequences. In some preferred embodiments, the capping region of the dTALEs described herein have sequences that are at least 95% identical or share identity to the capping region amino acid sequences provided herein.

[0531] Sequence homologies may be generated by any of a number of computer programs known in the art, for example BLAST or FASTA, etc. A suitable computer program for carrying out such an alignment is the GCG Wisconsin Bestfit package (University of Wisconsin, U.S.A; Devereux et al., 1984, Nucleic Acids Research 12:387). Examples of other software than may perform sequence comparisons include, but are not limited to, the BLAST package (see Ausubel et al., 1999 ibid-Chapter 18), FASTA (Atschul et al., 1990, J. Mol. Biol., 403-410) and the GENEWORKS suite of comparison tools. Both BLAST and FASTA are available for offline and online searching (see Ausubel et al., 1999 ibid, pages 7-58 to 7-60). However it is preferred to use the GCG Bestfit program.

[0532] Percentage (%) sequence homology may be calculated over contiguous sequences, i.e., one sequence is aligned with the other sequence and each amino acid or nucleotide in one sequence is directly compared with the corresponding amino acid or nucleotide in the other sequence, one residue at a time. This is called an “ungapped” alignment. Typically, such ungapped alignments are performed only over a relatively short number of residues.

[0533] Although this is a very simple and consistent method, it fails to take into consideration that, for example, in an otherwise identical pair of sequences, one insertion or deletion may cause the following amino acid residues to be put out of alignment, thus potentially resulting in a large reduction in % homology when a global alignment is performed. Consequently, most sequence comparison methods are designed to produce optimal alignments that take into consideration possible insertions and deletions without unduly penalizing the overall homology or identity score. This is achieved by inserting “gaps” in the sequence alignment to try to maximize local homology or identity.

[0534] However, these more complex methods assign “gap penalties” to each gap that occurs in the alignment so that, for the same number of identical amino acids, a sequence alignment with as few gaps as possible—reflecting higher relatedness between the two compared sequences—may achieve a higher score than one with many gaps. “Affinity gap costs” are typically used that charge a relatively high cost for the existence of a gap and a smaller penalty for each subsequent residue in the gap. This is the most commonly used gap scoring system. High gap penalties may, of course, produce optimized alignments with fewer gaps. Most alignment programs allow the gap penalties to be modified. However, it is preferred to use the default values when using such software for sequence comparisons. For example, when using the GCG Wisconsin Bestfit package the default gap penalty for amino acid sequences is −12 for a gap and −4 for each extension.

[0535] Calculation of maximum % homology therefore first requires the production of an optimal alignment, taking into consideration gap penalties. A suitable computer program for carrying out such an alignment is the GCG Wisconsin Bestfit package (Devereux et al., 1984 Nuc. Acids Research 12 p387). Examples of other software than may perform sequence comparisons include, but are not limited to, the BLAST package (see Ausubel et al., 1999 Short Protocols in Molecular Biology, 4^{th} Ed.—Chapter 18), FASTA (Altschul et al., 1990 J. Mol. Biol. 403-410) and the GENEWORKS suite of comparison tools. Both BLAST and FASTA are available for offline and online searching (see Ausubel et al., 1999, Short Protocols in Molecular Biology, pages 7-58 to 7-60). However, for some applications, it is preferred to use the GCG Bestfit program. A new tool, called BLAST 2 Sequences is also available for comparing protein and nucleotide sequences (see FEMS Microbiol Lett. 1999 174 (2): 247-50; FEMS Microbiol Lett. 1999 177 (1): 187-8 and the website of the National Center for Biotechnology information at the website of the National Institutes for Health).

[0536] Although the final % homology may be measured in terms of identity, the alignment process itself is typically not based on an all-or-nothing pair comparison. Instead, a scaled similarity score matrix is generally used that assigns scores to each pair-wise comparison based on chemical similarity or evolutionary distance. An example of such a matrix commonly used is the BLOSUM62 matrix—the default matrix for the BLAST suite of programs. GCG Wisconsin programs generally use either the public default values or a custom symbol comparison table, if supplied (see user manual for further details). For some applications, it is preferred to use the public default values for the GCG package, or in the case of other software, the default matrix, such as BLOSUM62.

[0537] Alternatively, percentage homologies may be calculated using the multiple alignment feature in DNASIS™ (Hitachi Software), based on an algorithm, analogous to CLUSTAL (Higgins D G & Sharp P M (1988), Gene 73 (1), 237-244). Once the software has produced an optimal alignment, it is possible to calculate % homology, preferably % sequence identity. The software typically does this as part of the sequence comparison and generates a numerical result.

[0538] The sequences may also have deletions, insertions or substitutions of amino acid residues which produce a silent change and result in a functionally equivalent substance. Deliberate amino acid substitutions may be made on the basis of similarity in amino acid properties (such as polarity, charge, solubility, hydrophobicity, hydrophilicity, and/or the amphipathic nature of the residues) and it is therefore useful to group amino acids together in functional groups. Amino acids may be grouped together based on the properties of their side chains alone. However, it is more useful to include mutation data as well. The sets of amino acids thus derived are likely to be conserved for structural reasons. These sets may be described in the form of a Venn diagram (Livingstone C. D. and Barton G. J. (1993) “Protein sequence alignments: a strategy for the hierarchical analysis of residue conservation” Comput. Appl. Biosci. 9:745-756) (Taylor W. R. (1986) “The classification of amino acid conservation” J. Theor. Biol. 119; 205-218). Conservative substitutions may be made, for example according to the table below which describes a generally accepted Venn diagram grouping of amino acids.

TABLE 6

| Set | | Sub-set | |
|---|---|---|---|
| Hydro- | F W Y H K M I L V | Aromatic | F W Y H |
| phobic | A G C | | |
| | | Aliphatic | I L V |
| Polar | W Y H K R E D C S | Charged | H K R E D |
| | T N Q | | |
| | | Positively | H K R |
| | | charged | |
| | | Negatively | E D |
| | | charged | |
| Small | V C A G S P T N D | Tiny | A G S |

[0539] Embodiments of the invention include sequences (both polynucleotide or polypeptide) which may comprise homologous substitution (substitution and replacement are both used herein to mean the interchange of an existing amino acid residue or nucleotide, with an alternative residue or nucleotide) that may occur i.e., like-for-like substitution in the case of amino acids such as basic for basic, acidic for acidic, polar for polar, etc. Non-homologous substitution may also occur i.e., from one class of residue to another or alternatively involving the inclusion of unnatural amino acids such as ornithine (hereinafter referred to as Z), diaminobutyric acid ornithine (hereinafter referred to as B), norleucine ornithine (hereinafter referred to as O), pyriylalanine, thienylalanine, naphthylalanine and phenylglycine.

[0540] Variant amino acid sequences may include suitable spacer groups that may be inserted between any two amino acid residues of the sequence including alkyl groups such as methyl, ethyl or propyl groups in addition to amino acid spacers such as glycine or β-alanine residues. A further form of variation, which involves the presence of one or more amino acid residues in peptoid form, may be well understood by those skilled in the art. For the avoidance of doubt, “the peptoid form” is used to refer to variant amino acid residues wherein the α-carbon substituent group is on the residue's nitrogen atom rather than the α-carbon. Processes for preparing peptides in the peptoid form are known in the art, for example Simon R J et al., PNAS (1992) 89 (20), 9367-9371 and Horwell D C, Trends Biotechnol. (1995) 13 (4), 132-134.

[0541] The practice of the present invention employs, unless otherwise indicated, conventional techniques of immunology, biochemistry, chemistry, molecular biology, microbiology, cell biology, genomics and recombinant DNA, which are within the skill of the art. See Sambrook, Fritsch and Maniatis, MOLECULAR CLONING: A LABORATORY MANUAL, 2nd edition (1989); CURRENT PROTOCOLS IN MOLECULAR BIOLOGY (F. M. Ausubel, et al. eds., (1987)); the series METHODS IN ENZYMOLOGY (Academic Press, Inc.): PCR 2: A PRACTICAL APPROACH (M. J. MacPherson, B. D. Hames and G. R. Taylor eds. (1995)), Harlow and Lane, eds. (1988) ANTIBODIES, A LABORATORY MANUAL, and ANIMAL CELL CULTURE (R. I. Freshney, ed. (1987)).

### Vectors

[0542] In one aspect, the invention provides for vectors that are used in the engineering and optimization of CRISPR-Cas systems. A used herein, a “vector” is a tool that allows or facilitates the transfer of an entity from one environment to another. It is a replicon, such as a plasmid, phage, or cosmid, into which another DNA segment may be inserted so as to bring about the replication of the inserted segment. Generally, a vector is capable of replication when associated with the proper control elements. In general, the term “vector” refers to a nucleic acid molecule capable of transporting another nucleic acid to which it has been linked. Vectors include, but are not limited to, nucleic acid molecules that are single-stranded, double-stranded, or partially double-stranded; nucleic acid molecules that comprise one or more free ends, no free ends (e.g. circular); nucleic acid molecules that comprise DNA, RNA, or both; and other varieties of polynucleotides known in the art. One type of vector is a “plasmid,” which refers to a circular double stranded DNA loop into which additional DNA segments can be inserted, such as by standard molecular cloning techniques. Another type of vector is a viral vector, wherein virally-derived DNA or RNA sequences are present in the vector for packaging into a virus (e.g. retroviruses, replication defective retroviruses, adenoviruses, replication defective adenoviruses, and adeno-associated viruses (AAVs)). Viral vectors also include polynucleotides carried by a virus for transfection into a host cell. Certain vectors are capable of autonomous replication in a host cell into which they are introduced (e.g. bacterial vectors having a bacterial origin of replication and episomal mammalian vectors). Other vectors (e.g., non-episomal mammalian vectors) are integrated into the genome of a host cell upon introduction into the host cell, and thereby are replicated along with the host genome. Moreover, certain vectors are capable of directing the expression of genes to which they are operatively-linked. Such vectors are referred to herein as “expression vectors.” Common expression vectors of utility in recombinant DNA techniques are often in the form of plasmids.

[0543] Recombinant expression vectors can comprise a nucleic acid of the invention in a form suitable for expression of the nucleic acid in a host cell, which means that the recombinant expression vectors include one or more regulatory elements, which may be selected on the basis of the host cells to be used for expression, that is operatively-linked to the nucleic acid sequence to be expressed. Within a recombinant expression vector, “operably linked” is intended to mean that the nucleotide sequence of interest is linked to the regulatory element(s) in a manner that allows for expression of the nucleotide sequence (e.g. in an in vitro transcription/translation system or in a host cell when the vector is introduced into the host cell). With regards to recombination and cloning methods, mention is made of U.S. patent application Ser. No. 10/815,730, published Sep. 2, 2004 as US 2004-0171156 A1, the contents of which are herein incorporated by reference in their entirety.

[0544] Aspects of the invention relate to bicistronic vectors for chimeric RNA and Cas9. Bicistronic expression vectors for chimeric RNA and Cas9 are preferred. In general and particularly in this embodiment Cas9 is preferably driven by the CBh promoter. The chimeric RNA may preferably be driven by a U6 promoter. Ideally the two are combined. The chimeric guide RNA typically consists of a 20 bp guide sequence (Ns) and this may be joined to the tracr sequence (running from the first “U” of the lower strand to the end of the transcript). The tracr sequence may be truncated at various positions as indicated. The guide and tracr sequences are separated by the tracr-mate sequence, which may be GUUUUAGAGCUA (SEQ ID NO: 92). This may be followed by the loop sequence GAAA as shown. Both of these are preferred examples. Applicants have demonstrated Cas9-mediated indels at the human EMX1 and PVALB loci by SURVEYOR assays. ChiRNAs are indicated by their “+n” designation, and crRNA refers to a hybrid RNA where guide and tracr sequences are expressed as separate transcripts. Throughout this application, chimeric RNA may also be called single guide, or synthetic guide RNA (sgRNA). The loop is preferably GAAA, but it is not limited to this sequence or indeed to being only 4 bp in length. Indeed, preferred loop forming sequences for use in hairpin structures are four nucleotides in length, and most preferably have the sequence GAAA. However, longer or shorter loop sequences may be used, as may alternative sequences. The sequences preferably include a nucleotide triplet (for example, AAA), and an additional nucleotide (for example C or G). Examples of loop forming sequences include CAAA and AAAG.

[0545] The term “regulatory element” is intended to include promoters, enhancers, internal ribosomal entry sites (IRES), and other expression control elements (e.g. transcription termination signals, such as polyadenylation signals and poly-U sequences). Such regulatory elements are described, for example, in Goeddel, GENE EXPRESSION TECHNOLOGY: METHODS IN ENZYMOLOGY 185, Academic Press, San Diego, Calif. (1990). Regulatory elements include those that direct constitutive expression of a nucleotide sequence in many types of host cell and those that direct expression of the nucleotide sequence only in certain host cells (e.g., tissue-specific regulatory sequences). A tissue-specific promoter may direct expression primarily in a desired tissue of interest, such as muscle, neuron, bone, skin, blood, specific organs (e.g. liver, pancreas), or particular cell types (e.g. lymphocytes). Regulatory elements may also direct expression in a temporal-dependent manner, such as in a cell-cycle dependent or developmental stage-dependent manner, which may or may not also be tissue or cell-type specific. In some embodiments, a vector comprises one or more pol III promoter (e.g. 1, 2, 3, 4, 5, or more pol III promoters), one or more pol II promoters (e.g. 1, 2, 3, 4, 5, or more pol II promoters), one or more pol I promoters (e.g. 1, 2, 3, 4, 5, or more pol I promoters), or combinations thereof. Examples of pol III promoters include, but are not limited to, U6 and H1 promoters. Examples of pol II promoters include, but are not limited to, the retroviral Rous sarcoma virus (RSV) LTR promoter (optionally with the RSV enhancer), the cytomegalovirus (CMV) promoter (optionally with the CMV enhancer) [see, e.g., Boshart et al, Cell, 41:521-530 (1985)], the SV40 promoter, the dihydrofolate reductase promoter, the β-actin promoter, the phosphoglycerol kinase (PGK) promoter, and the EF1α promoter. Also encompassed by the term “regulatory element” are enhancer elements, such as WPRE; CMV enhancers; the R-U5′ segment in LTR of HTLV-I (Mol. Cell. Biol., Vol. 8 (1), p. 466-472, 1988); SV40 enhancer; and the intron sequence between exons 2 and 3 of rabbit β-globin (Proc. Natl. Acad. Sci. USA., Vol. 78 (3), p. 1527-31, 1981). It will be appreciated by those skilled in the art that the design of the expression vector can depend on such factors as the choice of the host cell to be transformed, the level of expression desired, etc. A vector can be introduced into host cells to thereby produce transcripts, proteins, or peptides, including fusion proteins or peptides, encoded by nucleic acids as described herein (e.g., clustered regularly interspersed short palindromic repeats (CRISPR) transcripts, proteins, enzymes, mutant forms thereof, fusion proteins thereof, etc.). With regards to regulatory sequences, mention is made of U.S. patent application Ser. No. 10/491,026, the contents of which are incorporated by reference herein in their entirety. With regards to promoters, mention is made of PCT publication WO 2011/028929 and U.S. application Ser. No. 12/511,940, the contents of which are incorporated by reference herein in their entirety.

[0546] Vectors can be designed for expression of CRISPR transcripts (e.g. nucleic acid transcripts, proteins, or enzymes) in prokaryotic or eukaryotic cells. For example, CRISPR transcripts can be expressed in bacterial cells such as Escherichia coli, insect cells (using baculovirus expression vectors), yeast cells, or mammalian cells. Suitable host cells are discussed further in Goeddel, GENE EXPRESSION TECHNOLOGY: METHODS IN ENZYMOLOGY 185, Academic Press, San Diego, Calif. (1990). Alternatively, the recombinant expression vector can be transcribed and translated in vitro, for example using T7 promoter regulatory sequences and T7 polymerase (although any suitable DNA-dependent RNA polymerase can be used, such as SP6, T3 or T7). Amplification by T7 RNA polymerase requires the presence of suitable promoters in the RNA-coding DNA. Sequence requirements for polymerase binding sites are well known in the art. Various T7 RNA polymerase promoter sequences are known, including natural sequences and artificial ones. Different T7 RNA polymerases can have different promoter sequence preferences, and mutant T7 RNA polymerases have been produced to match specific promoters (e.g. see U.S. Pat. Nos. 5,122,457 and 5,385,834), but the skilled person can routinely obtain both T7 RNA polymerases and promoter sequences, and can easily match any particular T7 RNA polymerase to its preferred promoter sequence. The consensus 23 base-pair T7 DNA promoter is classically divided into two domains, an upstream binding domain (−17 to −5, numbered relative to the start of transcription), and a downstream initiation domain (−4 to +6). One strand. of this 23mer is 5′-TAATACGACTCACTATAGGGAGA-3′ (SEQ ID NO: 93). The minimum sequence required for efficient transcription is the first 19mer of this 23mer.

[0547] Vectors may be introduced and propagated in a prokaryote or prokaryotic cell. In some embodiments, a prokaryote is used to amplify copies of a vector to be introduced into a eukaryotic cell or as an intermediate vector in the production of a vector to be introduced into a eukaryotic cell (e.g. amplifying a plasmid as part of a viral vector packaging system). In some embodiments, a prokaryote is used to amplify copies of a vector and express one or more nucleic acids, such as to provide a source of one or more proteins for delivery to a host cell or host organism. Expression of proteins in prokaryotes is most often carried out in Escherichia coli with vectors containing constitutive or inducible promoters directing the expression of either fusion or non-fusion proteins. Fusion vectors add a number of amino acids to a protein encoded therein, such as to the amino terminus of the recombinant protein. Such fusion vectors may serve one or more purposes, such as: (i) to increase expression of recombinant protein; (ii) to increase the solubility of the recombinant protein; and (iii) to aid in the purification of the recombinant protein by acting as a ligand in affinity purification. Often, in fusion expression vectors, a proteolytic cleavage site is introduced at the junction of the fusion moiety and the recombinant protein to enable separation of the recombinant protein from the fusion moiety subsequent to purification of the fusion protein. Such enzymes, and their cognate recognition sequences, include Factor Xa, thrombin and enterokinase. Example fusion expression vectors include pGEX (Pharmacia Biotech Inc; Smith and Johnson, 1988. Gene 67:31-40), pMAL (New England Biolabs, Beverly, Mass.) and pRIT5 (Pharmacia, Piscataway, N.J.) that fuse glutathione S-transferase (GST), maltose E binding protein, or protein A, respectively, to the target recombinant protein.

[0548] Examples of suitable inducible non-fusion E. coli expression vectors include pTrc (Amrann et al., (1988) Gene 69:301-315) and pET 11d (Studier et al., GENE EXPRESSION TECHNOLOGY: METHODS IN ENZYMOLOGY 185, Academic Press, San Diego, Calif. (1990) 60-89).

[0549] In some embodiments, a vector is a yeast expression vector. Examples of vectors for expression in yeast Saccharomyces cerevisae include pYepSec1 (Baldari, et al., 1987. EMBO J. 6:229-234), pMFa (Kuijan and Herskowitz, 1982. Cell 30:933-943), pJRY88 (Schultz et al., 1987. Gene 54:113-123), pYES2 (Invitrogen Corporation, San Diego, Calif.), and picZ (In Vitrogen Corp, San Diego, Calif.).

[0550] In some embodiments, a vector drives protein expression in insect cells using baculovirus expression vectors. Baculovirus vectors available for expression of proteins in cultured insect cells (e.g., SF9 cells) include the pAc series (Smith, et al., 1983. Mol. Cell. Biol. 3:2156-2165) and the pVL series (Lucklow and Summers, 1989. Virology 170:31-39).

[0551] In some embodiments, a vector is capable of driving expression of one or more sequences in mammalian cells using a mammalian expression vector. Examples of mammalian expression vectors include pCDM8 (Seed, 1987. Nature 329:840) and pMT2PC (Kaufman, et al., 1987. EMBO J. 6:187-195). When used in mammalian cells, the expression vector's control functions are typically provided by one or more regulatory elements. For example, commonly used promoters are derived from polyoma, adenovirus 2, cytomegalovirus, simian virus 40, and others disclosed herein and known in the art. For other suitable expression systems for both prokaryotic and eukaryotic cells see, e.g., Chapters 16 and 17 of Sambrook, et al., MOLECULAR CLONING: A LABORATORY MANUAL. 2nd ed., Cold Spring Harbor Laboratory, Cold Spring Harbor Laboratory Press, Cold Spring Harbor, N.Y., 1989.

[0552] In some embodiments, the recombinant mammalian expression vector is capable of directing expression of the nucleic acid preferentially in a particular cell type (e.g., tissue-specific regulatory elements are used to express the nucleic acid). Tissue-specific regulatory elements are known in the art. Non-limiting examples of suitable tissue-specific promoters include the albumin promoter (liver-specific; Pinkert, et al., 1987. Genes Dev. 1:268-277), lymphoid-specific promoters (Calame and Eaton, 1988. Adv. Immunol. 43:235-275), in particular promoters of T cell receptors (Winoto and Baltimore, 1989. EMBO J. 8:729-733) and immunoglobulins (Baneiji, et al., 1983. Cell 33:729-740; Queen and Baltimore, 1983. Cell 33:741-748), neuron-specific promoters (e.g., the neurofilament promoter; Byrne and Ruddle, 1989. Proc. Natl. Acad. Sci. USA 86:5473-5477), pancreas-specific promoters (Edlund, et al., 1985. Science 230:912-916), and mammary gland-specific promoters (e.g., milk whey promoter; U.S. Pat. No. 4,873,316 and European Application Publication No. 264,166). Developmentally-regulated promoters are also encompassed, e.g., the murine hox promoters (Kessel and Gruss, 1990. Science 249:374-379) and the α-fetoprotein promoter (Campes and Tilghman, 1989. Genes Dev. 3:537-546). With regards to these prokaryotic and eukaryotic vectors, mention is made of U.S. Pat. No. 6,750,059, the contents of which are incorporated by reference herein in their entirety. Other embodiments of the invention may relate to the use of viral vectors, with regards to which mention is made of U.S. patent application Ser. No. 13/092,085, the contents of which are incorporated by reference herein in their entirety. Tissue-specific regulatory elements are known in the art and in this regard, mention is made of U.S. Pat. No. 7,776,321, the contents of which are incorporated by reference herein in their entirety.

### Regulatory Elements

[0553] In some embodiments, a regulatory element is operably linked to one or more elements of a CRISPR system so as to drive expression of the one or more elements of the CRISPR system. In general, CRISPRs (Clustered Regularly Interspaced Short Palindromic Repeats), also known as SPIDRs (SPacer Interspersed Direct Repeats), constitute a family of DNA loci that are usually specific to a particular bacterial species. The CRISPR locus comprises a distinct class of interspersed short sequence repeats (SSRs) that were recognized in E. coli (Ishino et al., J. Bacteriol., 169:5429-5433 [1987]; and Nakata et al., J. Bacteriol., 171:3553-3556 [1989]), and associated genes. Similar interspersed SSRs have been identified in Haloferax mediterranei, Streptococcus pyogenes, Anabaena, and Mycobacterium tuberculosis (See, Groenen et al., Mol. Microbiol., 10:1057-1065 [1993]; Hoe et al., Emerg. Infect. Dis., 5:254-263 [1999]; Masepohl et al., Biochim. Biophys. Acta 1307:26-30 [1996]; and Mojica et al., Mol. Microbiol., 17:85-93 [1995]). The CRISPR loci typically differ from other SSRs by the structure of the repeats, which have been termed short regularly spaced repeats (SRSRs) (Janssen et al., OMICS J. Integ. Biol., 6:23-33 [2002]; and Mojica et al., Mol. Microbiol., 36:244-246 [2000]). In general, the repeats are short elements that occur in clusters that are regularly spaced by unique intervening sequences with a substantially constant length (Mojica et al., [2000], supra). Although the repeat sequences are highly conserved between strains, the number of interspersed repeats and the sequences of the spacer regions typically differ from strain to strain (van Embden et al., J. Bacteriol., 182:2393-2401 [2000]). CRISPR loci have been identified in more than 40 prokaryotes (See e.g., Jansen et al., Mol. Microbiol., 43:1565-1575 [2002]; and Mojica et al.,) [2005]) including, but not limited to Aeropyrum, Pyrobaculum, Sulfolobus, Archaeoglobus, Halocarcula, Methanobacterium, Methanococcus, Methanosarcina, Methanopyrus, Pyrococcus, Picrophilus, Thermoplasma, Corynebacterium, Mycobacterium, Streptomyces, Aquifex, Porphyromonas, Chlorobium, Thermus, Bacillus, Listeria, Staphylococcus, Clostridium, Thermoanaerobacter, Mycoplasma, Fusobacterium, Azarcus, Chromobacterium, Neisseria, Nitrosomonas, Desulfovibrio, Geobacter, Myxococcus, Campylobacter, Wolinella, Acinetobacter, Erwinia, Escherichia, Legionella, Methylococcus, Pasteurella, Photobacterium, Salmonella, Xanthomonas, Yersinia, Treponema, and Thermotoga.

[0554] In general, “CRISPR system” refers collectively to transcripts and other elements involved in the expression of or directing the activity of CRISPR-associated (“Cas”) genes, including sequences encoding a Cas gene, a tracr (trans-activating CRISPR) sequence (e.g. tracrRNA or an active partial tracrRNA), a tracr-mate sequence (encompassing a “direct repeat” and a tracrRNA-processed partial direct repeat in the context of an endogenous CRISPR system), a guide sequence (also referred to as a “spacer” in the context of an endogenous CRISPR system), or other sequences and transcripts from a CRISPR locus. In embodiments of the invention the terms guide sequence and guide RNA are used interchangeably. In some embodiments, one or more elements of a CRISPR system is derived from a type I, type II, or type III CRISPR system. In some embodiments, one or more elements of a CRISPR system is derived from a particular organism comprising an endogenous CRISPR system, such as Streptococcus pyogenes. In general, a CRISPR system is characterized by elements that promote the formation of a CRISPR complex at the site of a target sequence (also referred to as a protospacer in the context of an endogenous CRISPR system). In the context of formation of a CRISPR complex, “target sequence” refers to a sequence to which a guide sequence is designed to have complementarity, where hybridization between a target sequence and a guide sequence promotes the formation of a CRISPR complex. A target sequence may comprise any polynucleotide, such as DNA or RNA polynucleotides. In some embodiments, a target sequence is located in the nucleus or cytoplasm of a cell.

[0555] In some embodiments, direct repeats may be identified in silico by searching for repetitive motifs that fulfill any or all of the following criteria: 1. found in a 2 Kb window of genomic sequence flanking the type II CRISPR locus; 2. span from 20 to 50 bp; and 3. interspaced by 20 to 50 bp. In some embodiments, 2 of these criteria may be used, for instance 1 and 2, 2 and 3, or 1 and 3. In some embodiments, all 3 criteria may be used. In some embodiments, candidate tracrRNA may be subsequently predicted by sequences that fulfill any or all of the following criteria: 1. sequence homology to direct repeats (motif search in Geneious with up to 18-bp mismatches); 2. presence of a predicted Rho-independent transcriptional terminator in direction of transcription; and 3. stable hairpin secondary structure between tracrRNA and direct repeat. In some embodiments, 2 of these criteria may be used, for instance 1 and 2, 2 and 3, or 1 and 3. In some embodiments, all 3 criteria may be used. In some embodiments, chimeric synthetic guide RNAs (sgRNAs) designs may incorporate at least 12 bp of duplex structure between the direct repeat and tracrRNA. In preferred embodiments of the invention, the CRISPR system is a type II CRISPR system and the Cas enzyme is Cas9, which catalyzes DNA cleavage. Enzymatic action by Cas9 derived from Streptococcus pyogenes or any closely related Cas9 generates double stranded breaks at target site sequences which hybridize to 20 nucleotides of the guide sequence and that have a protospacer-adjacent motif (PAM) sequence (examples include NGG/NRG or a PAM that can be determined as described herein) following the 20 nucleotides of the target sequence. CRISPR activity through Cas9 for site-specific DNA recognition and cleavage is defined by the guide sequence, the tracr sequence that hybridizes in part to the guide sequence and the PAM sequence. More aspects of the CRISPR system are described in Karginov and Hannon, The CRISPR system: small RNA-guided defence in bacteria and archaea, Mole Cell 2010 Jan. 15; 37 (1): 7.

[0556] The type II CRISPR locus from Streptococcus pyogenes SF370, which contains a cluster of four genes Cas9, Cas1, Cas2, and Csn1, as well as two non-coding RNA elements, tracrRNA and a characteristic array of repetitive sequences (direct repeats) interspaced by short stretches of non-repetitive sequences (spacers, about 30 bp each). In this system, targeted DNA double-strand break (DSB) is generated in four sequential steps (FIG. 2A). First, two non-coding RNAs, the pre-crRNA array and tracrRNA, are transcribed from the CRISPR locus. Second, tracrRNA hybridizes to the direct repeats of pre-crRNA, which is then processed into mature crRNAs containing individual spacer sequences. Third, the mature crRNA:tracrRNA complex directs Cas9 to the DNA target consisting of the protospacer and the corresponding PAM via heteroduplex formation between the spacer region of the crRNA and the protospacer DNA. Finally, Cas9 mediates cleavage of target DNA upstream of PAM to create a DSB within the protospacer (FIG. 2A). FIG. 2B demonstrates the nuclear localization of the codon optimized Cas9. To promote precise transcriptional initiation, the RNA polymerase III-based U6 promoter was selected to drive the expression of tracrRNA (FIG. 2C). Similarly, a U6 promoter-based construct was developed to express a pre-crRNA array consisting of a single spacer flanked by two direct repeats (DRs, also encompassed by the term “tracr-mate sequences”; FIG. 2C). The initial spacer was designed to target a 33-base-pair (bp) target site (30-bp protospacer plus a 3-bp CRISPR motif (PAM) sequence satisfying the NGG recognition motif of Cas9) in the human EMX1 locus (FIG. 2C), a key gene in the development of the cerebral cortex.

[0557] Typically, in the context of an endogenous CRISPR system, formation of a CRISPR complex (comprising a guide sequence hybridized or hybridizable to a target sequence and complexed with one or more Cas proteins) results in cleavage of one or both strands in or near (e.g. within 1, 2, 3, 4, 5, 6, 7, 8, 9, 10, 20, 50, or more base pairs from) the target sequence. Without wishing to be bound by theory, the tracr sequence, which may comprise or consist of all or a portion of a wild-type tracr sequence (e.g. about or more than about 20, 26, 32, 45, 48, 54, 63, 67, 85, or more nucleotides of a wild-type tracr sequence), may also form part of a CRISPR complex, such as by hybridization along at least a portion of the tracr sequence to all or a portion of a tracr mate sequence that is operably linked to the guide sequence. In some embodiments, one or more vectors driving expression of one or more elements of a CRISPR system are introduced into a host cell such that expression of the elements of the CRISPR system direct formation of a CRISPR complex at one or more target sites. For example, a Cas enzyme, a guide sequence linked to a tracr-mate sequence, and a tracr sequence could each be operably linked to separate regulatory elements on separate vectors. Alternatively, two or more of the elements expressed from the same or different regulatory elements, may be combined in a single vector, with one or more additional vectors providing any components of the CRISPR system not included in the first vector. CRISPR system elements that are combined in a single vector may be arranged in any suitable orientation, such as one element located 5′ with respect to (“upstream” of) or 3′ with respect to (“downstream” of) a second element. The coding sequence of one element may be located on the same or opposite strand of the coding sequence of a second element, and oriented in the same or opposite direction. In some embodiments, a single promoter drives expression of a transcript encoding a CRISPR enzyme and one or more of the guide sequence, tracr mate sequence (optionally operably linked to the guide sequence), and a tracr sequence embedded within one or more intron sequences (e.g. each in a different intron, two or more in at least one intron, or all in a single intron). In some embodiments, the CRISPR enzyme, guide sequence, tracr mate sequence, and tracr sequence are operably linked to and expressed from the same promoter.

[0558] In some embodiments, a vector comprises one or more insertion sites, such as a restriction endonuclease recognition sequence (also referred to as a “cloning site”). In some embodiments, one or more insertion sites (e.g. about or more than about 1, 2, 3, 4, 5, 6, 7, 8, 9, 10, or more insertion sites) are located upstream and/or downstream of one or more sequence elements of one or more vectors. In some embodiments, a vector comprises an insertion site upstream of a tracr mate sequence, and optionally downstream of a regulatory element operably linked to the tracr mate sequence, such that following insertion of a guide sequence into the insertion site and upon expression the guide sequence directs sequence-specific binding of a CRISPR complex to a target sequence in a eukaryotic cell. In some embodiments, a vector comprises two or more insertion sites, each insertion site being located between two tracr mate sequences so as to allow insertion of a guide sequence at each site. In such an arrangement, the two or more guide sequences may comprise two or more copies of a single guide sequence, two or more different guide sequences, or combinations of these. When multiple different guide sequences are used, a single expression construct may be used to target CRISPR activity to multiple different, corresponding target sequences within a cell. For example, a single vector may comprise about or more than about 1, 2, 3, 4, 5, 6, 7, 8, 9, 10, 15, 20, or more guide sequences. In some embodiments, about or more than about 1, 2, 3, 4, 5, 6, 7, 8, 9, 10, or more such guide-sequence-containing vectors may be provided, and optionally delivered to a cell.

[0559] In some embodiments, a vector comprises a regulatory element operably linked to an enzyme-coding sequence encoding a CRISPR enzyme, such as a Cas protein. Non-limiting examples of Cas proteins include Cas1, Cas1B, Cas2, Cas3, Cas4, Cas5, Cas6, Cas7, Cas8, Cas9 (also known as Csn1 and Csx12), Cas10, Csy1, Csy2, Csy3, Cse1, Cse2, Csc1, Csc2, Csa5, Csn2, Csm2, Csm3, Csm4, Csm5, Csm6, Cmr1, Cmr3, Cmr4, Cmr5, Cmr6, Csb1, Csb2, Csb3, Csx17, Csx14, Csx10, Csx16, CsaX, Csx3, Csx1, Csx15, Csf1, Csf2, Csf3, Csf4, homologues thereof, or modified versions thereof. In some embodiments, the unmodified CRISPR enzyme has DNA cleavage activity, such as Cas9. In some embodiments, the CRISPR enzyme directs cleavage of one or both strands at the location of a target sequence, such as within the target sequence and/or within the complement of the target sequence. In some embodiments, the CRISPR enzyme directs cleavage of one or both strands within about 1, 2, 3, 4, 5, 6, 7, 8, 9, 10, 15, 20, 25, 50, 100, 200, 500, or more base pairs from the first or last nucleotide of a target sequence. In some embodiments, a vector encodes a CRISPR enzyme that is mutated to with respect to a corresponding wild-type enzyme such that the mutated CRISPR enzyme lacks the ability to cleave one or both strands of a target polynucleotide containing a target sequence. For example, an aspartate-to-alanine substitution (D10A) in the RuvC I catalytic domain of Cas9 from S. pyogenes converts Cas9 from a nuclease that cleaves both strands to a nickase (cleaves a single strand). Other examples of mutations that render Cas9 a nickase include, without limitation, H840A, N854A, and N863A. As a further example, two or more catalytic domains of Cas9 (RuvC I, RuvC II, and RuvC III or the HNH domain) may be mutated to produce a mutated Cas9 substantially lacking all DNA cleavage activity. In some embodiments, a D10A mutation is combined with one or more of H840A, N854A, or N863A mutations to produce a Cas9 enzyme substantially lacking all DNA cleavage activity. In some embodiments, a CRISPR enzyme is considered to substantially lack all DNA cleavage activity when the DNA cleavage activity of the mutated enzyme is less than about 25%, 10%, 5%, 1%, 0.1%, 0.01%, or lower with respect to its non-mutated form. Where the enzyme is not SpCas9, mutations may be made at any or all residues corresponding to positions 10, 762, 840, 854, 863 and/or 986 of SpCas9 (which may be ascertained for instance by standard sequence comparison tools. In particular, any or all of the following mutations are preferred in SpCas9: D10A, E762A, H840A, N854A, N863A and/or D986A; as well as conservative substitution for any of the replacement amino acids is also envisaged. The same (or conservative substitutions of these mutations) at corresponding positions in other Cas9s are also preferred. Particularly preferred are D10 and H840 in SpCas9. However, in other Cas9s, residues corresponding to SpCas9 D10 and H840 are also preferred.

[0560] An aspartate-to-alanine substitution (D10A) in the RuvC I catalytic domain of SpCas9 was engineered to convert the nuclease into a nickase (SpCas9n) (see e.g. Sapranauskas et al., 2011, Nucleic Acis Research, 39:9275; Gasiunas et al., 2012, Proc. Natl. Acad. Sci. USA, 109: E2579), such that nicked genomic DNA undergoes the high-fidelity homology-directed repair (HDR). Surveyor assay confirmed that SpCas9n does not generate indels at the EMX1 protospacer target. Co-expression of EMX1-targeting chimeric crRNA (having the tracrRNA component as well) with SpCas9 produced indels in the target site, whereas co-expression with SpCas9n did not (n=3). Moreover, sequencing of 327 amplicons did not detect any indels induced by SpCas9n. The same locus was selected to test CRISPR-mediated HR by co-transfecting HEK 293 FT cells with the chimeric RNA targeting EMX1, hSpCas9 or hSpCas9n, as well as a HR template to introduce a pair of restriction sites (HindIII and NheI) near the protospacer.

[0561] Preferred orthologs are described herein. A Cas enzyme may be identified Cas9 as this can refer to the general class of enzymes that share homology to the biggest nuclease with multiple nuclease domains from the type II CRISPR system. Most preferably, the Cas9 enzyme is from, or is derived from, spCas9 or saCas9. By derived, Applicants mean that the derived enzyme is largely based, in the sense of having a high degree of sequence homology with, a wildtype enzyme, but that it has been mutated (modified) in some way as described herein.

[0562] It will be appreciated that the terms Cas and CRISPR enzyme are generally used herein interchangeably, unless otherwise apparent. As mentioned above, many of the residue numberings used herein refer to the Cas9 enzyme from the type II CRISPR locus in Streptococcus pyogenes. However, it will be appreciated that this invention includes many more Cas9s from other species of microbes, such as SpCas9, SaCa9, StlCas9 and so forth.

### Codon Optimization

[0563] An example of a codon optimized sequence, in this instance optimized for humans (i.e. being optimized for expression in humans) is provided herein, see the SaCas9 human codon optimized sequence. Whilst this is preferred, it will be appreciated that other examples are possible and codon optimization for a host species is known. In some embodiments, an enzyme coding sequence encoding a CRISPR enzyme is codon optimized for expression in particular cells, such as eukaryotic cells. The eukaryotic cells may be those of or derived from a particular organism, such as a mammal, including but not limited to human, mouse, rat, rabbit, dog, or non-human mammal or primate. In some embodiments, processes for modifying the germ line genetic identity of human beings and/or processes for modifying the genetic identity of animals which are likely to cause them suffering without any substantial medical benefit to man or animal, and also animals resulting from such processes, may be excluded.

[0564] In general, codon optimization refers to a process of modifying a nucleic acid sequence for enhanced expression in the host cells of interest by replacing at least one codon (e.g. about or more than about 1, 2, 3, 4, 5, 10, 15, 20, 25, 50, or more codons) of the native sequence with codons that are more frequently or most frequently used in the genes of that host cell while maintaining the native amino acid sequence. Various species exhibit particular bias for certain codons of a particular amino acid. Codon bias (differences in codon usage between organisms) often correlates with the efficiency of translation of messenger RNA (mRNA), which is in turn believed to be dependent on, among other things, the properties of the codons being translated and the availability of particular transfer RNA (tRNA) molecules. The predominance of selected tRNAs in a cell is generally a reflection of the codons used most frequently in peptide synthesis. Accordingly, genes can be tailored for optimal gene expression in a given organism based on codon optimization. Codon usage tables are readily available, for example, at the “Codon Usage Database” available at www.kazusa.orjp/codon/(visited Jul. 9, 2002), and these tables can be adapted in a number of ways. See Nakamura, Y., et al. “Codon usage tabulated from the international DNA sequence databases: status for the year 2000” Nucl. Acids Res. 28:292 (2000). Computer algorithms for codon optimizing a particular sequence for expression in a particular host cell are also available, such as Gene Forge (Aptagen; Jacobus, PA), are also available. In some embodiments, one or more codons (e.g. 1, 2, 3, 4, 5, 10, 15, 20, 25, 50, or more, or all codons) in a sequence encoding a CRISPR enzyme correspond to the most frequently used codon for a particular amino acid.

[0565] Codon usage can even be optimized for expression in particular cell types e.g. for brain cells. For instance, Plotkin et al. (2004) PNAS USA 101:12588-91 reports on tissue-specific codon usage and notes, for instance, that brain-specific genes show a characteristically different codon usage than liver-specific genes. Thus a protein-coding sequence can be codon-optimised for expression in a target cell type of interest e.g. for expression in the liver.

### Nuclear Localization Sequences (NLSs)

[0566] In some embodiments, a vector encodes a CRISPR enzyme comprising one or more nuclear localization sequences (NLSs), such as about or more than about 1, 2, 3, 4, 5, 6, 7, 8, 9, 10, or more NLSs. In some embodiments, the CRISPR enzyme comprises about or more than about 1, 2, 3, 4, 5, 6, 7, 8, 9, 10, or more NLSs at or near the amino-terminus, about or more than about 1, 2, 3, 4, 5, 6, 7, 8, 9, 10, or more NLSs at or near the carboxy-terminus, or a combination of these (e.g. one or more NLS at the amino-terminus and one or more NLS at the carboxy terminus). When more than one NLS is present, each may be selected independently of the others, such that a single NLS may be present in more than one copy and/or in combination with one or more other NLSs present in one or more copies. In a preferred embodiment of the invention, the CRISPR enzyme comprises at most 6 NLSs. In some embodiments, an NLS is considered near the N- or C-terminus when the nearest amino acid of the NLS is within about 1, 2, 3, 4, 5, 10, 15, 20, 25, 30, 40, 50, or more amino acids along the polypeptide chain from the N- or C-terminus. Non-limiting examples of NLSs include an NLS sequence derived from: the NLS of the SV40 virus large T-antigen, having the amino acid sequence PKKKRKV (SEQ ID NO: 22); the NLS from nucleoplasmin (e.g. the nucleoplasmin bipartite NLS with the sequence KRPAATKKAGQAKKKK (SEQ ID NO: 23)); the c-myc NLS having the amino acid sequence PAAKRVKLD (SEQ ID NO: 24) or RQRRNELKRSP (SEQ ID NO: 25); the hRNPA1 M9 NLS having the sequence NQSSNFGPMKGGNFGGRSSGPYGGGGQYFAKPRNQGGY (SEQ ID NO: 26); the sequence RMRIZFKNKGKDTAELRRRRVEVSVELRKAKKDEQILKRRNV (SEQ ID NO: 27) of the IBB domain from importin-alpha; the sequences VSRKRPRP (SEQ ID NO: 28) and PPKKARED (SEQ ID NO: 29) of the myoma T protein; the sequence PQPKKKPL (SEQ ID NO: 30) of human p53; the sequence SALIKKKKKMAP (SEQ ID NO: 31) of mouse c-abl IV; the sequences DRLRR (SEQ ID NO: 32) and PKQKKRK (SEQ ID NO: 33) of the influenza virus NS1; the sequence RKLKKKIKKL (SEQ ID NO: 34) of the Hepatitis virus delta antigen; the sequence REKKKFLKRR (SEQ ID NO: 35) of the mouse Mx1 protein; the sequence KRKGDEVDGVDEVAKKKSKK (SEQ ID NO: 36) of the human poly(ADP-ribose) polymerase; and the sequence RKCLQAGMNLEARKTKK (SEQ ID NO: 37) of the steroid hormone receptors (human) glucocorticoid.

[0567] In general, the one or more NLSs are of sufficient strength to drive accumulation of the CRISPR enzyme in a detectable amount in the nucleus of a eukaryotic cell. In general, strength of nuclear localization activity may derive from the number of NLSs in the CRISPR enzyme, the particular NLS(s) used, or a combination of these factors. Detection of accumulation in the nucleus may be performed by any suitable technique. For example, a detectable marker may be fused to the CRISPR enzyme, such that location within a cell may be visualized, such as in combination with a means for detecting the location of the nucleus (e.g. a stain specific for the nucleus such as DAPI). Cell nuclei may also be isolated from cells, the contents of which may then be analyzed by any suitable process for detecting protein, such as immunohistochemistry, Western blot, or enzyme activity assay. Accumulation in the nucleus may also be determined indirectly, such as by an assay for the effect of CRISPR complex formation (e.g. assay for DNA cleavage or mutation at the target sequence, or assay for altered gene expression activity affected by CRISPR complex formation and/or CRISPR enzyme activity), as compared to a control no exposed to the CRISPR enzyme or complex, or exposed to a CRISPR enzyme lacking the one or more NLSs.

### Guide Sequence

[0568] In general, a guide sequence is any polynucleotide sequence having sufficient complementarity with a target polynucleotide sequence to hybridize with the target sequence and direct sequence-specific binding of a CRISPR complex to the target sequence. In some embodiments, the degree of complementarity between a guide sequence and its corresponding target sequence, when optimally aligned using a suitable alignment algorithm, is about or more than about 50%, 60%, 75%, 80%, 85%, 90%, 95%, 97.5%, 99%, or more. Optimal alignment may be determined with the use of any suitable algorithm for aligning sequences, non-limiting example of which include the Smith-Waterman algorithm, the Needleman-Wunsch algorithm, algorithms based on the Burrows-Wheeler Transform (e.g. the Burrows Wheeler Aligner), ClustalW, Clustal X, BLAT, Novoalign (Novocraft Technologies; available at www.novocraft.com), ELAND (Illumina, San Diego, CA), SOAP (available at soap.genomics.org.cn), and Maq (available at maq.sourceforge.net). In some embodiments, a guide sequence is about or more than about 5, 10, 11, 12, 13, 14, 15, 16, 17, 18, 19, 20, 21, 22, 23, 24, 25, 26, 27, 28, 29, 30, 35, 40, 45, 50, 75, or more nucleotides in length. In some embodiments, a guide sequence is less than about 75, 50, 45, 40, 35, 30, 25, 20, 15, 12, or fewer nucleotides in length. The ability of a guide sequence to direct sequence-specific binding of a CRISPR complex to a target sequence may be assessed by any suitable assay. For example, the components of a CRISPR system sufficient to form a CRISPR complex, including the guide sequence to be tested, may be provided to a host cell having the corresponding target sequence, such as by transfection with vectors encoding the components of the CRISPR sequence, followed by an assessment of preferential cleavage within the target sequence, such as by Surveyor assay as described herein. Similarly, cleavage of a target polynucleotide sequence may be evaluated in a test tube by providing the target sequence, components of a CRISPR complex, including the guide sequence to be tested and a control guide sequence different from the test guide sequence, and comparing binding or rate of cleavage at the target sequence between the test and control guide sequence reactions. Other assays are possible, and will occur to those skilled in the art.

[0569] A guide sequence may be selected to target any target sequence. In some embodiments, the target sequence is a sequence within a genome of a cell. Exemplary target sequences include those that are unique in the target genome. For example, for the S. pyogenes Cas9, a unique target sequence in a genome may include a Cas9 target site of the form MMMMMMMMNNNNNNNNNNNNXGG (SEQ ID NO: 1) where NNNNNNNNNNNNXGG (SEQ ID NO: 2) (N is A, G, T, or C; and X can be anything) has a single occurrence in the genome. A unique target sequence in a genome may include an S. pyogenes Cas9 target site of the form MMMMMMMMMNNNNNNNNNNNXGG (SEQ ID NO: 3) where NNNNNNNNNNNXGG (SEQ ID NO: 4) (N is A, G, T, or C; and X can be anything) has a single occurrence in the genome. For the S. thermophilus CRISPR1 Cas9, a unique target sequence in a genome may include a Cas9 target site of the form MMMMMMMMNNNNNNNNNNNNXXAGAAW (SEQ ID NO: 5) where NNNNNNNNNNNNXXAGAAW (SEQ ID NO: 6) (N is A, G, T, or C; X can be anything; and W is A or T) has a single occurrence in the genome. A unique target sequence in a genome may include an S. thermophilus CRISPR1 Cas9 target site of the form MMMMMMMMMNNNNNNNNNNNXXAGAAW (SEQ ID NO: 7) where NNNNNNNNNNNXXAGAAW (SEQ ID NO: 8) (N is A, G, T, or C; X can be anything; and W is A or T) has a single occurrence in the genome. For the S. pyogenes Cas9, a unique target sequence in a genome may include a Cas9 target site of the form MMMMMMMMNNNNNNNNNNNNXGGXG ID where (SEQ NO: 9) NNNNNNNNNNNNXGGXG (SEQ ID NO: 10) (N is A, G, T, or C; and X can be anything) has a single occurrence in the genome. A unique target sequence in a genome may include an S. pyogenes Cas9 target site of the form MMMMMMMMMNNNNNNNNNNNXGGXG (SEQ ID NO: 11) where NNNNNNNNNNNXGGXG (SEQ ID NO: 12) (Nis A, G, T, or C; and X can be anything) has a single occurrence in the genome. In each of these sequences “M” may be A, G, T, or C, and need not be considered in identifying a sequence as unique. In some embodiments, a guide sequence is selected to reduce the degree secondary structure within the guide sequence. In some embodiments, about or less than about 75%, 50%, 40%, 30%, 25%, 20%, 15%, 10%, 5%, 1%, or fewer of the nucleotides of the guide sequence participate in self-complementary base pairing when optimally folded. Optimal folding may be determined by any suitable polynucleotide folding algorithm. Some programs are based on calculating the minimal Gibbs free energy. An example of one such algorithm is mFold, as described by Zuker and Stiegler (Nucleic Acids Res. 9 (1981), 133-148). Another example folding algorithm is the online webserver RNAfold, developed at Institute for Theoretical Chemistry at the University of Vienna, using the centroid structure prediction algorithm (see e.g. A. R. Gruber et al., 2008, Cell 106 (1): 23-24; and PA Carr and GM Church, 2009, Nature Biotechnology 27 (12): 1151-62).

### Tracr Mate Sequence

[0570] In general, a tracr mate sequence includes any sequence that has sufficient complementarity with a tracr sequence to promote one or more of: (1) excision of a guide sequence flanked by tracr mate sequences in a cell containing the corresponding tracr sequence; and (2) formation of a CRISPR complex at a target sequence, wherein the CRISPR complex comprises the tracr mate sequence hybridized or hybridizable to the tracr sequence. In general, degree of complementarity is with reference to the optimal alignment of the tracr mate sequence and tracr sequence, along the length of the shorter of the two sequences. Optimal alignment may be determined by any suitable alignment algorithm, and may further account for secondary structures, such as self-complementarity within either the tracr sequence or tracr mate sequence. In some embodiments, the degree of complementarity between the tracr sequence and tracr mate sequence along the length of the shorter of the two when optimally aligned is about or more than about 25%, 30%, 40%, 50%, 60%, 70%, 80%, 90%, 95%, 97.5%, 99%, or higher. In some embodiments, the tracr sequence is about or more than about 5, 6, 7, 8, 9, 10, 11, 12, 13, 14, 15, 16, 17, 18, 19, 20, 25, 30, 40, 50, or more nucleotides in length. In some embodiments, the tracr sequence and tracr mate sequence are contained within a single transcript, such that hybridization between the two produces a transcript having a secondary structure, such as a hairpin. In an embodiment of the invention, the transcript or transcribed polynucleotide sequence has at least two or more hairpins. In preferred embodiments, the transcript has two, three, four or five hairpins. In a further embodiment of the invention, the transcript has at most five hairpins. In a hairpin structure the portion of the sequence 5′ of the final “N” and upstream of the loop corresponds to the tracr mate sequence, and the portion of the sequence 3′ of the loop corresponds to the tracr sequence Further non-limiting examples of single polynucleotides comprising a guide sequence, a tracr mate sequence, and a tracr sequence are as follows (listed 5′ to 3′), where “N” represents a base of a guide sequence, the first block of lower case letters represent the tracr mate sequence, and the second block of lower case letters represent the tracr sequence, and the final poly-T sequence represents the transcription terminator: (1) NNNNNNNNNNNNNNNNNNNNgtttttgtactctcaagatttaGAAAtaaatcttgcagaagctacaaagataa ggcttcatgccgaaatcaacaccctgtcattttatggcagggtgttttcgttatttaaTTTTTT (SEQ ID NO: 13); (2) NNNNNNNNNNNNNNNNNNNNgtttttgtactctcaGAAAtgcagaagctacaaagataaggcttcatgccg aaatcaacaccctgtcattttatggcagggtgttttcgttatttaaTTTTTT (SEQ ID NO: 14); (3) NNNNNNNNNNNNNNNNNNNNgtttttgtactctcaGAAAtgcagaagctacaaagataaggcttcatgccg aaatcaacaccctgtcattttatggcagggtgtTTTTTT (SEQ ID NO: 15) (4) NNNNNNNNNNNNNNNNNNNNgttttagagctaGAAAtagcaagttaaaataaggctagtccgttatcaactt gaaaaagtggcaccgagtcggtgcTTTTTT (SEQ ID NO: 16); (5) NNNNNNNNNNNNNNNNNNNNgttttagagctaGAAATAGcaagttaaaataaggctagtccgttatcaac ttgaaaaagtgTTTTTTT (SEQ ID NO: 17); and (6) NNNNNNNNNNNNNNNNNNNNgttttagagctagAAATAGcaagttaaaataaggctagtccgttatcaTT TTTTTT (SEQ ID NO: 18). In some embodiments, sequences (1) to (3) are used in combination with Cas9 from S. thermophilus CRISPR1. In some embodiments, sequences (4) to (6) are used in combination with Cas9 from S. pyogenes. In some embodiments, the tracr sequence is a separate transcript from a transcript comprising the tracr mate sequence.

### Recombination Template

[0571] In some embodiments, a recombination template is also provided. A recombination template may be a component of another vector as described herein, contained in a separate vector, or provided as a separate polynucleotide. In some embodiments, a recombination template is designed to serve as a template in homologous recombination, such as within or near a target sequence nicked or cleaved by a CRISPR enzyme as a part of a CRISPR complex. A template polynucleotide may be of any suitable length, such as about or more than about 10, 15, 20, 25, 50, 75, 100, 150, 200, 500, 1000, or more nucleotides in length. In some embodiments, the template polynucleotide is complementary to a portion of a polynucleotide comprising the target sequence. When optimally aligned, a template polynucleotide might overlap with one or more nucleotides of a target sequences (e.g. about or more than about 1, 5, 10, 15, 20, or more nucleotides). In some embodiments, when a template sequence and a polynucleotide comprising a target sequence are optimally aligned, the nearest nucleotide of the template polynucleotide is within about 1, 5, 10, 15, 20, 25, 50, 75, 100, 200, 300, 400, 500, 1000, 5000, 10000, or more nucleotides from the target sequence.

### Fusion Protein

[0572] In some embodiments, the CRISPR enzyme is part of a fusion protein comprising one or more heterologous protein domains (e.g. about or more than about 1, 2, 3, 4, 5, 6, 7, 8, 9, 10, or more domains in addition to the CRISPR enzyme). A CRISPR enzyme fusion protein may comprise any additional protein sequence, and optionally a linker sequence between any two domains. Examples of protein domains that may be fused to a CRISPR enzyme include, without limitation, epitope tags, reporter gene sequences, and protein domains having one or more of the following activities: methylase activity, demethylase activity, transcription activation activity, transcription repression activity, transcription release factor activity, histone modification activity, RNA cleavage activity and nucleic acid binding activity. Non-limiting examples of epitope tags include histidine (His) tags, V5 tags, FLAG tags, influenza hemagglutinin (HA) tags, Myc tags, VSV-G tags, and thioredoxin (Trx) tags. Examples of reporter genes include, but are not limited to, glutathione-S-transferase (GST), horseradish peroxidase (HRP), chloramphenicol acetyltransferase (CAT) beta-galactosidase, beta-glucuronidase, luciferase, green fluorescent protein (GFP), HcRed, DsRed, cyan fluorescent protein (CFP), yellow fluorescent protein (YFP), and autofluorescent proteins including blue fluorescent protein (BFP). A CRISPR enzyme may be fused to a gene sequence encoding a protein or a fragment of a protein that bind DNA molecules or bind other cellular molecules, including but not limited to maltose binding protein (MBP), S-tag, Lex A DNA binding domain (DBD) fusions, GAL4 DNA binding domain fusions, and herpes simplex virus (HSV) BP16 protein fusions. Additional domains that may form part of a fusion protein comprising a CRISPR enzyme are described in US20110059502, incorporated herein by reference. In some embodiments, a tagged CRISPR enzyme is used to identify the location of a target sequence.

### Inducible System

[0573] In some embodiments, a CRISPR enzyme may form a component of an inducible system. The inducible nature of the system would allow for spatiotemporal control of gene editing or gene expression using a form of energy. The form of energy may include but is not limited to electromagnetic radiation, sound energy, chemical energy and thermal energy. Examples of inducible system include tetracycline inducible promoters (Tet-On or Tet-Off), small molecule two-hybrid transcription activations systems (FKBP, ABA, etc), or light inducible systems (Phytochrome, LOV domains, or cryptochrome). In one embodiment, the CRISPR enzyme may be a part of a Light Inducible Transcriptional Effector (LITE) to direct changes in transcriptional activity in a sequence-specific manner. The components of a light may include a CRISPR enzyme, a light-responsive cytochrome heterodimer (e.g. from Arabidopsis thaliana), and a transcriptional activation/repression domain. Further examples of inducible DNA binding proteins and methods for their use are provided in U.S. 61/736,465 and U.S. 61/721,283, which is hereby incorporated by reference in its entirety (see also Konerman et al. (2013) Nature doi: 10.1038/nature12466).

### Delivery

[0574] In some aspects, the invention provides methods comprising delivering one or more polynucleotides, such as or one or more vectors as described herein, one or more transcripts thereof, and/or one or proteins transcribed therefrom, to a host cell. In some aspects, the invention further provides cells produced by such methods, and animals comprising or produced from such cells. In some embodiments, a CRISPR enzyme in combination with (and optionally complexed with) a guide sequence is delivered to a cell. Conventional viral and non-viral based gene transfer methods can be used to introduce nucleic acids in mammalian cells or target tissues. Such methods can be used to administer nucleic acids encoding components of a CRISPR system to cells in culture, or in a host organism. Non-viral vector delivery systems include DNA plasmids, RNA (e.g. a transcript of a vector described herein), naked nucleic acid, and nucleic acid complexed with a delivery vehicle, such as a liposome. Viral vector delivery systems include DNA and RNA viruses, which have either episomal or integrated genomes after delivery to the cell. For a review of gene therapy procedures, see Anderson, Science 256:808-813 (1992); Nabel & Felgner, TIBTECH 11:211-217 (1993); Mitani & Caskey, TIBTECH 11:162-166 (1993); Dillon, TIBTECH 11:167-175 (1993); Miller, Nature 357:455-460 (1992); Van Brunt, Biotechnology 6 (10): 1149-1154 (1988); Vigne, Restorative Neurology and Neuroscience 8:35-36 (1995); Kremer & Perricaudet, British Medical Bulletin 51 (1): 31-44 (1995); Haddada et al., in Current Topics in Microbiology and Immunology Doerfler and Böhm (eds) (1995); and Yu et al., Gene Therapy 1:13-26 (1994).

[0575] Methods of non-viral delivery of nucleic acids include lipofection, microinjection, biolistics, virosomes, liposomes, immunoliposomes, polycation or lipid: nucleic acid conjugates, naked DNA, artificial virions, and agent-enhanced uptake of DNA. Lipofection is described in e.g., U.S. Pat. Nos. 5,049,386, 4,946,787; and 4,897,355) and lipofection reagents are sold commercially (e.g., Transfectam™ and Lipofectin™). Cationic and neutral lipids that are suitable for efficient receptor-recognition lipofection of polynucleotides include those of Felgner, WO 91/17424; WO 91/16024. Delivery can be to cells (e.g. in vitro or ex vivo administration) or target tissues (e.g. in vivo administration).

[0576] The preparation of lipid: nucleic acid complexes, including targeted liposomes such as immunolipid complexes, is well known to one of skill in the art (see, e.g., Crystal, Science 270:404-410 (1995); Blaese et al., Cancer Gene Ther. 2:291-297 (1995); Behr et al., Bioconjugate Chem. 5:382-389 (1994); Remy et al., Bioconjugate Chem. 5:647-654 (1994); Gao et al., Gene Therapy 2:710-722 (1995); Ahmad et al., Cancer Res. 52:4817-4820 (1992); U.S. Pat. Nos. 4,186,183, 4,217,344, 4,235,871, 4,261,975, 4,485,054, 4,501,728, 4,774,085, 4,837,028, and 4,946,787).

[0577] The use of RNA or DNA viral based systems for the delivery of nucleic acids take advantage of highly evolved processes for targeting a virus to specific cells in the body and trafficking the viral payload to the nucleus. Viral vectors can be administered directly to patients (in vivo) or they can be used to treat cells in vitro, and the modified cells may optionally be administered to patients (ex vivo). Conventional viral based systems could include retroviral, lentivirus, adenoviral, adeno-associated and herpes simplex virus vectors for gene transfer. Integration in the host genome is possible with the retrovirus, lentivirus, and adeno-associated virus gene transfer methods, often resulting in long term expression of the inserted transgene. Additionally, high transduction efficiencies have been observed in many different cell types and target tissues.

[0578] The tropism of a retrovirus can be altered by incorporating foreign envelope proteins, expanding the potential target population of target cells. Lentiviral vectors are retroviral vectors that are able to transduce or infect non-dividing cells and typically produce high viral titers. Selection of a retroviral gene transfer system would therefore depend on the target tissue. Retroviral vectors are comprised of cis-acting long terminal repeats with packaging capacity for up to 6-10 kb of foreign sequence. The minimum cis-acting LTRs are sufficient for replication and packaging of the vectors, which are then used to integrate the therapeutic gene into the target cell to provide permanent transgene expression. Widely used retroviral vectors include those based upon murine leukemia virus (MuLV), gibbon ape leukemia virus (GaLV), Simian Immuno deficiency virus (SIV), human immuno deficiency virus (HIV), and combinations thereof (see, e.g., Buchscher et al., J. Virol. 66:2731-2739 (1992); Johann et al., J. Virol. 66:1635-1640 (1992); Sommnerfelt et al., Virol. 176:58-59 (1990); Wilson et al., J. Virol. 63:2374-2378 (1989); Miller et al., J. Virol. 65:2220-2224 (1991); WO94/26877).

[0579] In another embodiment, Cocal vesiculovirus envelope pseudotyped retroviral vector particles are contemplated (see, e.g., US Patent Publication No. 20120164118 assigned to the Fred Hutchinson Cancer Research Center). Cocal virus is in the Vesiculovirus genus, and is a causative agent of vesicular stomatitis in mammals. Cocal virus was originally isolated from mites in Trinidad (Jonkers et al., Am. J. Vet. Res. 25:236-242 (1964)), and infections have been identified in Trinidad, Brazil, and Argentina from insects, cattle, and horses. Many of the vesiculoviruses that infect mammals have been isolated from naturally infected arthropods, suggesting that they are vector-borne. Antibodies to vesiculoviruses are common among people living in rural areas where the viruses are endemic and laboratory-acquired; infections in humans usually result in influenza-like symptoms. The Cocal virus envelope glycoprotein shares 71.5% identity at the amino acid level with VSV-G Indiana, and phylogenetic comparison of the envelope gene of vesiculoviruses shows that Cocal virus is serologically distinct from, but most closely related to, VSV-G Indiana strains among the vesiculoviruses. Jonkers et al., Am. J. Vet. Res. 25:236-242 (1964) and Travassos da Rosa et al., Am. J. Tropical Med. & Hygiene 33:999-1006 (1984). The Cocal vesiculovirus envelope pseudotyped retroviral vector particles may include for example, lentiviral, alpharetroviral, betaretroviral, gammaretroviral, deltaretroviral, and epsilonretroviral vector particles that may comprise retroviral Gag, Pol, and/or one or more accessory protein(s) and a Cocal vesiculovirus envelope protein. Within certain aspects of these embodiments, the Gag, Pol, and accessory proteins are lentiviral and/or gammaretroviral.

[0580] In applications where transient expression is preferred, adenoviral based systems may be used. Adenoviral based vectors are capable of very high transduction efficiency in many cell types and do not require cell division. With such vectors, high titer and levels of expression have been obtained. This vector can be produced in large quantities in a relatively simple system.

[0581] Adeno-associated virus (“AAV”) vectors may also be used to transduce cells with target nucleic acids, e.g., in the in vitro production of nucleic acids and peptides, and for in vivo and ex vivo gene therapy procedures (see, e.g., West et al., Virology 160:38-47 (1987); U.S. Pat. No. 4,797,368; WO 93/24641; Kotin, Human Gene Therapy 5:793-801 (1994); Muzyczka, J. Clin. Invest. 94:1351 (1994). Construction of recombinant AAV vectors are described in a number of publications, including U.S. Pat. No. 5,173,414; Tratschin et al., Mol. Cell. Biol. 5:3251-3260 (1985); Tratschin, et al., Mol. Cell. Biol. 4:2072-2081 (1984); Hermonat & Muzyczka, PNAS 81:6466-6470 (1984); and Samulski et al., J. Virol. 63:03822-3828 (1989).

[0582] Packaging cells are typically used to form virus particles that are capable of infecting a host cell. Such cells include 293 or PER.C6 cells, which package adenovirus, and w2 cells or PA317 cells, which package retrovirus. Viral vectors used in gene therapy are usually generated by producer a cell line that packages a nucleic acid vector into a viral particle. The vectors typically contain the minimal viral sequences required for packaging and subsequent integration into a host, other viral sequences being replaced by an expression cassette for the polynucleotide(s) to be expressed. The missing viral functions are typically supplied in trans by the packaging cell line. For example, AAV vectors used in gene therapy typically only possess ITR sequences from the AAV genome which are required for packaging and integration into the host genome. Viral DNA is packaged in a cell line, which contains a helper plasmid encoding the other AAV genes, namely rep and cap, but lacking ITR sequences. The cell line may also infected with adenovirus as a helper. The helper virus promotes replication of the AAV vector and expression of AAV genes from the helper plasmid. The helper plasmid is not packaged in significant amounts due to a lack of ITR sequences. Contamination with adenovirus can be reduced by, e.g., heat treatment to which adenovirus is more sensitive than AAV. Accordingly, AAV is considered an ideal candidate for use as a transducing vector. Such AAV transducing vectors can comprise sufficient cis-acting functions to replicate in the presence of adenovirus or herpesvirus or poxvirus (e.g., vaccinia virus) helper functions provided in trans. Recombinant AAV (rAAV) can be used to carry exogenous genes into cells of a variety of lineages. In these vectors, the AAV cap and/or rep genes are deleted from the viral genome and replaced with a DNA segment of choice. Current AAV vectors may accommodate up to 4300 bases of inserted DNA.

[0583] There are a number of ways to produce rAAV, and the invention provides rAAV and methods for preparing rAAV. For example, plasmid(s) containing or consisting essentially of the desired viral construct are transfected into AAV-infected cells or into a packaging cell. In addition, a second or additional helper plasmid is cotransfected into these cells to provide the AAV rep and/or cap genes which are obligatory for replication and packaging of the recombinant viral construct. Under these conditions, the rep and/or cap proteins of AAV act in trans to stimulate replication and packaging of the rAAV construct. Two to Three days after transfection, rAAV is harvested. Traditionally rAAV is harvested from the cells along with adenovirus. The contaminating adenovirus is then inactivated by heat treatment. In the instant invention, rAAV is advantageously harvested not from the cells themselves, but from cell supernatant. Accordingly, in an initial aspect the invention provides for preparing rAAV, and in addition to the foregoing, rAAV can be prepared by a method that comprises or consists essentially of: infecting susceptible cells with a rAAV containing exogenous DNA including DNA for expression, and helper virus (e.g., adenovirus, herpesvirus, poxvirus such as vaccinia virus) wherein the rAAV lacks functioning cap and/or rep (and the helper virus (e.g., adenovirus, herpesvirus, poxvirus such as vaccinia virus) provides the cap and/or rev function that the rAAV lacks); or infecting susceptible cells with a rAAV containing exogenous DNA including DNA for expression, wherein the recombinant lacks functioning cap and/or rep, and transfecting said cells with a plasmid supplying cap and/or rep function that the rAAV lacks; or infecting susceptible cells with a rAAV containing exogenous DNA including DNA for expression, wherein the recombinant lacks functioning cap and/or rep, wherein said cells supply cap and/or rep function that the recombinant lacks; or transfecting the susceptible cells with an AAV lacking functioning cap and/or rep and plasmids for inserting exogenous DNA into the recombinant so that the exogenous DNA is expressed by the recombinant and for supplying rep and/or cap functions whereby transfection results in an rAAV containing the exogenous DNA including DNA for expression that lacks functioning cap and/or rep.

[0584] The rAAV can be from an AAV as herein described, and advantageously can be an rAAV1, rAAV2, AAV5 or rAAV having hybrid or capsid which may comprise AAV1, AAV2, AAV5 or any combination thereof. One can select the AAV of the rAAV with regard to the cells to be targeted by the rAAV; e.g., one can select AAV serotypes 1, 2, 5 or a hybrid or capsid AAV1, AAV2, AAV5 or any combination thereof for targeting brain or neuronal cells; and one can select AAV4 for targeting cardiac tissue. In addition to 293 cells, other cells that can be used in the practice of the invention and the relative infectivity of certain AAV serotypes in vitro as to these cells (see Grimm, D. et al, J. Virol. 82:5887-5911 (2008)) are as follows:

TABLE 7

| | AAV- | AAV- | AAV- | AAV- | AAV- | AAV- | AAV- | AAV- |
|---|---|---|---|---|---|---|---|---|
| Cell Line | 1 | 2 | 3 | 4 | 5 | 6 | 8 | 9 |
| Huh-7 | 13 | 100 | 2.5 | 0.0 | 0.1 | 10 | 0.7 | 0.0 |
| HEK293 | 25 | 100 | 2.5 | 0.1 | 0.1 | 5 | 0.7 | 0.1 |
| HeLa | 3 | 100 | 2.0 | 0.1 | 6.7 | 1 | 0.2 | 0.1 |
| HepG2 | 3 | 100 | 16.7 | 0.3 | 1.7 | 5 | 0.3 | ND |
| Hep1A | 20 | 100 | 0.2 | 1.0 | 0.1 | 1 | 0.2 | 0.0 |
| 911 | 17 | 100 | 11 | 0.2 | 0.1 | 17 | 0.1 | ND |
| CHO | 100 | 100 | 14 | 1.4 | 333 | 50 | 10 | 1.0 |
| COS | 33 | 100 | 33 | 3.3 | 5.0 | 14 | 2.0 | 0.5 |
| MeWo | 10 | 100 | 20 | 0.3 | 6.7 | 10 | 1.0 | 0.2 |
| NIH3T3 | 10 | 100 | 2.9 | 2.9 | 0.3 | 10 | 0.3 | ND |
| A549 | 14 | 100 | 20 | ND | 0.5 | 10 | 0.5 | 0.1 |
| HT1180 | 20 | 100 | 10 | 0.1 | 0.3 | 33 | 0.5 | 0.1 |
| Monocytes | 1111 | 100 | ND | ND | 125 | 1429 | ND | ND |
| Immature DC | 2500 | 100 | ND | ND | 222 | 2857 | ND | ND |
| Mature DC | 2222 | 100 | ND | ND | 333 | 3333 | ND | ND |

[0585] The invention provides rAAV that contains or consists essentially of an exogenous nucleic acid molecule encoding a CRISPR (Clustered Regularly Interspaced Short Palindromic Repeats) system, e.g., a plurality of cassettes comprising or consisting a first cassette comprising or consisting essentially of a promoter, a nucleic acid molecule encoding a CRISPR-associated (Cas) protein (putative nuclease or helicase proteins), e.g., Cas9 and a terminator, and a two, or more, advantageously up to the packaging size limit of the vector, e.g., in total (including the first cassette) five, cassettes comprising or consisting essentially of a promoter, nucleic acid molecule encoding guide RNA (gRNA) and a terminator (e.g., each cassette schematically represented as Promoter-gRNA1-terminator, Promoter-gRNA2-terminator Promoter-gRNA (N)-terminator (where N is a number that can be inserted that is at an upper limit of the packaging size limit of the vector), or two or more individual rAAVs, each containing one or more than one cassette of a CRISPR system, e.g., a first rAAV containing the first cassette comprising or consisting essentially of a promoter, a nucleic acid molecule encoding Cas, e.g., Cas9 and a terminator, and a second rAAV containing a plurality, four, cassettes comprising or consisting essentially of a promoter, nucleic acid molecule encoding guide RNA (gRNA) and a terminator (e.g., each cassette schematically represented as Promoter-gRNA1-terminator, Promoter-gRNA2-terminator. Promoter-gRNA (N)-terminator (where N is a number that can be inserted that is at an upper limit of the packaging size limit of the vector). As rAAV is a DNA virus, the nucleic acid molecules in the herein discussion concerning AAV or rAAV are advantageously DNA. The promoter is in some embodiments advantageously human Synapsin I promoter (hSyn).

[0586] Additional methods for the delivery of nucleic acids to cells are known to those skilled in the art. See, for example, US20030087817, incorporated herein by reference. In some embodiments, a host cell is transiently or non-transiently transfected with one or more vectors described herein. In some embodiments, a cell is transfected as it naturally occurs in a subject. In some embodiments, a cell that is transfected is taken from a subject. In some embodiments, the cell is derived from cells taken from a subject, such as a cell line. A wide variety of cell lines for tissue culture are known in the art. Examples of cell lines include, but are not limited to, C8161, CCRF-CEM, MOLT, mIMCD-3, NHDF, HeLa-S3, Huh1, Huh4, Huh7, HUVEC, HASMC, HEKn, HEKa, MiaPaCell, Panc1, PC-3, TF1, CTLL-2, CIR, Rat6, CV1, RPTE, A10, T24, J82, A375, ARH-77, Calu1, SW480, SW620, SKOV3, SK-UT, CaCo2, P388D1, SEM-K2, WEHI-231, HB56, TIB55, Jurkat, J45.01, LRMB, Bcl-1, BC-3, IC21, DLD2, Raw264.7, NRK, NRK-52E, MRC5, MEF, Hep G2, HeLa B, HeLa T4, COS, COS-1, COS-6, COS-M6A, BS-C-1 monkey kidney epithelial, BALB/3T3 mouse embryo fibroblast, 3T3 Swiss, 3T3-L1, 132-d5 human fetal fibroblasts; 10.1 mouse fibroblasts, 293-T, 3T3, 721, 9L, A2780, A2780ADR, A2780cis, A172, A20, A253, A431, A-549, ALC, B16, B35, BCP-1 cells, BEAS-2B, bEnd.3, BHK-21, BR 293, BxPC3, C3H-10T1/2, C6/36, Cal-27, CHO, CHO-7, CHO—IR, CHO-K1, CHO-K2, CHO-T, CHO Dhfr −/−, COR-L23, COR-L23/CPR, COR-L23/5010, COR-L23/R23, COS-7, COV-434, CML T1, CMT, CT26, D17, DH82, DU145, DuCaP, EL4, EM2, EM3, EMT6/AR1, EMT6/AR10.0, FM3, H1299, H69, HB54, HB55, HCA2, HEK-293, HeLa, Hepa1c1c7, HL-60, HMEC, HT-29, Jurkat, JY cells, K562 cells, Ku812, KCL22, KG1, KYO1, LNCap, Ma-Mel 1-48, MC-38, MCF-7, MCF-10A, MDA-MB-231, MDA-MB-468, MDA-MB-435, MDCK II, MDCK II, MOR/0.2R, MONO-MAC 6, MTD-1A, MyEnd, NCI-H69/CPR, NCI-H69/LX10, NCI-H69/LX20, NCI-H69/LX4, NIH-3T3, NALM-1, NW-145, OPCN/OPCT cell lines, Peer, PNT-1A/PNT 2, RenCa, RIN-5F, RMA/RMAS, Saos-2 cells, Sf-9, SkBr3, T2, T-47D, T84, THP1 cell line, U373, U87, U937, VCaP, Vero cells, WM39, WT-49, X63, YAC-1, YAR, and transgenic varieties thereof. Cell lines are available from a variety of sources known to those with skill in the art (see, e.g., the American Type Culture Collection (ATCC) (Manassas, Va.)). In some embodiments, a cell transfected with one or more vectors described herein is used to establish a new cell line comprising one or more vector-derived sequences. In some embodiments, a cell transiently transfected with the components of a CRISPR system as described herein (such as by transient transfection of one or more vectors, or transfection with RNA), and modified through the activity of a CRISPR complex, is used to establish a new cell line comprising cells containing the modification but lacking any other exogenous sequence. In some embodiments, cells transiently or non-transiently transfected with one or more vectors described herein, or cell lines derived from such cells are used in assessing one or more test compounds.

[0587] In another embodiment, a fluid delivery device with an array of needles (see, e.g., US Patent Publication No. 20110230839 assigned to the Fred Hutchinson Cancer Research Center) may be contemplated for delivery of CRISPR Cas to solid tissue. A device of US Patent Publication No. 20110230839 for delivery of a fluid to a solid tissue may comprise a plurality of needles arranged in an array; a plurality of reservoirs, each in fluid communication with a respective one of the plurality of needles; and a plurality of actuators operatively coupled to respective ones of the plurality of reservoirs and configured to control a fluid pressure within the reservoir. In certain embodiments each of the plurality of actuators may comprise one of a plurality of plungers, a first end of each of the plurality of plungers being received in a respective one of the plurality of reservoirs, and in certain further embodiments the plungers of the plurality of plungers are operatively coupled together at respective second ends so as to be simultaneously depressable. Certain still further embodiments may comprise a plunger driver configured to depress all of the plurality of plungers at a selectively variable rate. In other embodiments each of the plurality of actuators may comprise one of a plurality of fluid transmission lines having first and second ends, a first end of each of the plurality of fluid transmission lines being coupled to a respective one of the plurality of reservoirs. In other embodiments the device may comprise a fluid pressure source, and each of the plurality of actuators comprises a fluid coupling between the fluid pressure source and a respective one of the plurality of reservoirs. In further embodiments the fluid pressure source may comprise at least one of a compressor, a vacuum accumulator, a peristaltic pump, a master cylinder, a microfluidic pump, and a valve. In another embodiment, each of the plurality of needles may comprise a plurality of ports distributed along its length.

### Modifying a Target

[0588] In one aspect, the invention provides for methods of modifying a target polynucleotide in a eukaryotic cell, which may be in vivo, ex vivo or in vitro. In some embodiments, the method comprises sampling a cell or population of cells from a human or non-human animal, or a plant, and modifying the cell or cells. Culturing may occur at any stage ex vivo. The cell or cells may even be re-introduced into the non-human animal or plant. For re-introduced cells it is particularly preferred that the cells are stem cells. In some embodiments, the method comprises allowing a CRISPR complex to bind to the target polynucleotide to effect cleavage of said target polynucleotide thereby modifying the target polynucleotide, wherein the CRISPR complex comprises a CRISPR enzyme complexed with a guide sequence hybridized or hybridizable to a target sequence within said target polynucleotide, wherein said guide sequence is linked to a tracr mate sequence which in turn hybridizes to a tracr sequence.

[0589] In one aspect, the invention provides a method of modifying expression of a polynucleotide in a eukaryotic cell. In some embodiments, the method comprises allowing a CRISPR complex to bind to the polynucleotide such that said binding results in increased or decreased expression of said polynucleotide; wherein the CRISPR complex comprises a CRISPR enzyme complexed with a guide sequence hybridized or hybridizable to a target sequence within said polynucleotide, wherein said guide sequence is linked to a tracr mate sequence which in turn hybridizes to a tracr sequence. Similar considerations and conditions apply as above for methods of modifying a target polynucleotide. In fact, these sampling, culturing and re-introduction options apply across the aspects of the present invention. Indeed, in any aspect of the invention, the CRISPR complex may comprise a CRISPR enzyme complexed with a guide sequence hybridized or hybridizable to a target sequence, wherein said guide sequence may be linked to a tracr mate sequence which in turn may hybridize to a tracr sequence. Similar considerations and conditions apply as above for methods of modifying a target polynucleotide.

### Kits

[0590] In one aspect, the invention provides kits containing any one or more of the elements disclosed in the above methods and compositions. Elements may be provided individually or in combinations, and may be provided in any suitable container, such as a vial, a bottle, or a tube. In some embodiments, the kit includes instructions in one or more languages, for example in more than one language. In some embodiments, a kit comprises one or more reagents for use in a process utilizing one or more of the elements described herein. Reagents may be provided in any suitable container. For example, a kit may provide one or more reaction or storage buffers. Reagents may be provided in a form that is usable in a particular assay, or in a form that requires addition of one or more other components before use (e.g. in concentrate or lyophilized form). A buffer can be any buffer, including but not limited to a sodium carbonate buffer, a sodium bicarbonate buffer, a borate buffer, a Tris buffer, a MOPS buffer, a HEPES buffer, and combinations thereof. In some embodiments, the buffer is alkaline. In some embodiments, the buffer has a pH from about 7 to about 10. In some embodiments, the kit comprises one or more oligonucleotides corresponding to a guide sequence for insertion into a vector so as to operably link the guide sequence and a regulatory element. In some embodiments, the kit comprises a homologous recombination template polynucleotide. In some embodiments, the kit comprises one or more of the vectors and/or one or more of the polynucleotides described herein. The kit may advantageously allows to provide all elements of the systems of the invention.

### CRISPR Complex

[0591] In one aspect, the invention provides methods for using one or more elements of a CRISPR system. The CRISPR complex of the invention provides an effective means for modifying a target polynucleotide. The CRISPR complex of the invention has a wide variety of utility including modifying (e.g., deleting, inserting, translocating, inactivating) a target polynucleotide in a multiplicity of cell types. An exemplary CRISPR complex comprises a CRISPR enzyme complexed with a guide sequence hybridized or hybridizable to a target sequence within the target polynucleotide. The guide sequence is linked to a tracr mate sequence, which in turn hybridizes to a tracr sequence. In one embodiment, this invention provides a method of cleaving a target polynucleotide. The method comprises modifying a target polynucleotide using a CRISPR complex that binds to the target polynucleotide and effect cleavage of said target polynucleotide. Typically, the CRISPR complex of the invention, when introduced into a cell, creates a break (e.g., a single or a double strand break) in the genome sequence. For example, the method can be used to cleave an integrated viral gene in a cell. The break created by the CRISPR complex can be repaired by a repair processes such as the error prone non-homologous end joining (NHEJ) pathway or the high fidelity homology-directed repair (HDR) (FIG. 29). During these repair process, an exogenous polynucleotide template can be introduced into the genome sequence. In some methods, the HDR process is used modify genome sequence. For example, an exogenous polynucleotide template comprising a sequence to be integrated flanked by an upstream sequence and a downstream sequence is introduced into a cell. The upstream and downstream sequences share sequence similarity with either side of the site of integration in the chromosome. Where desired, a donor polynucleotide can be DNA, e.g., a DNA plasmid, a bacterial artificial chromosome (BAC), a yeast artificial chromosome (YAC), a viral vector, a linear piece of DNA, a PCR fragment, a naked nucleic acid, or a nucleic acid complexed with a delivery vehicle such as a liposome or poloxamer. The exogenous polynucleotide template comprises a sequence to be integrated (e.g., a mutated gene). The sequence for integration may be a sequence endogenous or exogenous to the cell. Examples of a sequence to be integrated include polynucleotides encoding a protein or a non-coding RNA (e.g., a microRNA). Thus, the sequence for integration may be operably linked to an appropriate control sequence or sequences. Alternatively, the sequence to be integrated may provide a regulatory function. The upstream and downstream sequences in the exogenous polynucleotide template are selected to promote recombination between the chromosomal sequence of interest and the donor polynucleotide. The upstream sequence is a nucleic acid sequence that shares sequence similarity with the genome sequence upstream of the targeted site for integration. Similarly, the downstream sequence is a nucleic acid sequence that shares sequence similarity with the chromosomal sequence downstream of the targeted site of integration. The upstream and downstream sequences in the exogenous polynucleotide template can have 75%, 80%, 85%, 90%, 95%, or 100% sequence identity with the targeted genome sequence. Preferably, the upstream and downstream sequences in the exogenous polynucleotide template have about 95%, 96%, 97%, 98%, 99%, or 100% sequence identity with the targeted genome sequence. In some methods, the upstream and downstream sequences in the exogenous polynucleotide template have about 99% or 100% sequence identity with the targeted genome sequence. An upstream or downstream sequence may comprise from about 20 bp to about 2500 bp, for example, about 50, 100, 200, 300, 400, 500, 600, 700, 800, 900, 1000, 1100, 1200, 1300, 1400, 1500, 1600, 1700, 1800, 1900, 2000, 2100, 2200, 2300, 2400, or 2500 bp. In some methods, the exemplary upstream or downstream sequence have about 200 bp to about 2000 bp, about 600 bp to about 1000 bp, or more particularly about 700 bp to about 1000 bp. In some methods, the exogenous polynucleotide template may further comprise a marker. Such a marker may make it easy to screen for targeted integrations. Examples of suitable markers include restriction sites, fluorescent proteins, or selectable markers. The exogenous polynucleotide template of the invention can be constructed using recombinant techniques (see, for example, Sambrook et al., 2001 and Ausubel et al., 1996). In an exemplary method for modifying a target polynucleotide by integrating an exogenous polynucleotide template, a double stranded break is introduced into the genome sequence by the CRISPR complex, the break is repaired via homologous recombination an exogenous polynucleotide template such that the template is integrated into the genome. The presence of a double-stranded break facilitates integration of the template.

[0592] In other embodiments, this invention provides a method of modifying expression of a polynucleotide in a eukaryotic cell. The method comprises decreasing expression of a target polynucleotide by using a CRISPR complex that binds to the polynucleotide. In some methods, a target polynucleotide can be inactivated to effect the modification of the expression in a cell. For example, upon the binding of a CRISPR complex to a target sequence in a cell, the target polynucleotide is inactivated such that the sequence is not transcribed, the coded protein or RNA is not produced, or the sequence does not function as the wild-type sequence does. For example, a protein or microRNA coding sequence may be inactivated such that the protein or microRNA is not produced. In some methods, a control sequence can be inactivated such that it no longer functions as a control sequence. As used herein, “control sequence” refers to any nucleic acid sequence that effects the transcription, translation, or accessibility of a nucleic acid sequence. Examples of a control sequence include, a promoter, a transcription terminator, and an enhancer are control sequences. The inactivated target sequence may include a deletion mutation (i.e., deletion of one or more nucleotides), an insertion mutation (i.e., insertion of one or more nucleotides), or a nonsense mutation (i.e., substitution of a single nucleotide for another nucleotide such that a stop codon is introduced). In some methods, the inactivation of a target sequence results in “knock-out” of the target sequence.

[0593] The term “wild type StCas9” refers to wild type Cas9 from S thermophilus, the protein sequence of which is given in the SwissProt database under accession number G3ECR1. Similarly, S pyogenes Cas9 is included in SwissProt under accession number Q99ZW2.

### Preclinical Translation

[0594] To switch to a CRISPR/Cas system compatible with clinically-tested liver-directed gene delivery, Applicants may switch from using SpCas9 to the smaller SaCas9.

[0595] A first step is to redesign and produce sgRNA sequences compatible with the SaCas9 PAM. Then, the sgRNAs are cloned into a viral vector (likely lentiviral for initial in vitro cell line studies) and these new guides are screened for their ability to cleave cccDNA in de novo infections. These experiments use the HepG2-hNTCP knockin cell lines and HBV virions purified from HepG2.2.15 cells. The screen is performed either with guides in individual wells side-by-side, or using a pooled format in which lentivirus is produced with a pool of all possible sgRNA sequences against HBV, and then deep sequencing identifies regions of the HBV genome most susceptible to cleavage by SaCas9.

[0596] Once a smaller list of 3-10 guides is chosen, more targeted experiments are performed in both in vitro and in vivo models of HBV infection in primary human hepatocytes (see e.g., Schlomai et al., (2014) Proceedings of the National Academy of Sciences, 111 (33): 12193-12198; Bissig et al., (2014) Journal of Clinical Investigation, 120 (3): 924-930; Legrand N et al. (2009) Cell Host & Microbe, 6 (1): 5-9). These experiments can also utilize targeting with multiple sgRNAs simultaneously to induce cccDNA fragmentation). Additional possibilities include using other delivery systems (perhaps nonviral) as herein described.

[0597] Rationale for choosing appropriate sgRNAs for anti-HBV CRISPR/Cas9 systems: The process is a multistep one in which several parameters should be optimized: efficacy of the sgRNA sequence, targeting to an accessible part of cccDNA, conservation of the target sequence across viral genotypes, and minimization of target sequence homology to the human genome. These criteria should be general criteria across all episomal viruses, although the specifics may differ (for example, HBV cccDNA seems to be most accessible to cleavage in the ORF for Core, and it is possible that latent HSV may be most accessible in the region encoding latency-associated transcript LAT). The general workflow is as follows:
[0598] Use CRISPR design tool to identify all possible sgRNAs for the virus of interest (for targeting dsDNA forms, such as HBV, look at targets on both positive and negative strands), based on the PAM for the Cas9 of interest (e.g. SpCas0, SaCas9)
[0599] Use available efficacy prediction tools (e.g. Doench et al. 2014. Nat Biotech for SpCas9) to predict on-target efficacy of the sgRNAs for initial prioritization
[0600] Perform some combination of literature search and pilot experiments using sgRNAs targeting diverse regions of the viral genome, followed by assessing cleavage efficiency at these sites, to determine which parts of viral genome are most efficiently cleaved by Cas9. Prioritize sgRNAs that hit these regions.
[0601] From this downselected list of sgRNAs, further prioritize by how strongly conserved the target sequences are across viral genotypes. This can be done by performing primer BLAST against the full set of viral whole genome sequences deposited in GenBank. For example, for HBV there are a little over 5000 whole genome sequences from different strains and patient isolates. Ideal conservation across these sequences is 90+%.
[0602] Finally, further downselect by choosing sgRNAs that have low homology to the human genome-typically this will not be a problem for viral genomes, since they are generally divergent from human genomic sequences (perhaps endogenous retroviruse regions are an exception, but these are predominantly nonfunctional)
[0603] Efficacy in vitro and in vivo, as well as selectivity and minimizatrion of off-target effects, can then be determined experimentally in the proper model systems.

[0604] Below exhaustive list of possible sgRNAs for both SaCas9 and SpCas9. In these tables, the columns correspond to the sgRNA target DNA sequence (target sequence+PAM), the strand on which the target sequence and PAM are found (cccDNA is double-stranded), the nucleotide of the circular HBV genome at which the target sequence starts (HBV cccDNA is 3182 bp total), whether the sgRNA targets the Core ORF (which Applicants have found to be most capable of cleavage by Cas9), and finally whether or not the sgRNA is very close (+/−50 nt) on the HBV genome to where Applicants' most effective sgRNA (g17) targets.

SaCas9 sgRNAs

| | SEQ | | | | Close |
|---|---|---|---|---|---|
| | ID | nt | | | to |
| 20nt guide + 5 nt PAM | NO: | Start | Sense | Core? | G17? |
| CACCAAACTCTGCAAGATCCCAGAG | 94 | 16 | Positive | | |
| AAACTCTGCAAGATCCCAGAGTGAG | 95 | 20 | Positive | | |
| ACTCTGCAAGATCCCAGAGTGAGAG | 96 | 22 | Positive | | |
| CCCTGCTGGTGGCTCCAGTTCAGGA | 97 | 57 | Positive | | |
| CCTGCTGGTGGCTCCAGTTCAGGAG | 98 | 58 | Positive | | |
| CTCCCTTATCGTCAATCTTCTCGAG | 99 | 110 | Positive | | |
| CCCTTATCGTCAATCTTCTCGAGGA | 100 | 112 | Positive | | |
| ATCGTCAATCTTCTCGAGGATTGGG | 101 | 117 | Positive | | |
| TCGTCAATCTTCTCGAGGATTGGGG | 102 | 118 | Positive | | |
| CGTCAATCTTCTCGAGGATTGGGGA | 103 | 119 | Positive | | |
| CGAGGATTGGGGACCCTGCGCTGAA | 104 | 131 | Positive | | |
| TTGGGGACCCTGCGCTGAACATGGA | 105 | 137 | Positive | | |
| TGGGGACCCTGCGCTGAACATGGAG | 106 | 138 | Positive | | |
| GGGACCCTGCGCTGAACATGGAGAA | 107 | 140 | Positive | | |
| GAACATGGAGAACATCACATCAGGA | 108 | 153 | Positive | | |
| GAACATCACATCAGGATTCCTAGGA | 109 | 162 | Positive | | |
| GACCCCTTCTCGTGTTACAGGCGGG | 110 | 185 | Positive | | |
| ACCCCTTCTCGTGTTACAGGCGGGG | 111 | 186 | Positive | | |
| GCGGGGTTTTTCTTGTTGACAAGAA | 112 | 205 | Positive | | |
| CAAGAATCCTCACAATACCGCAGAG | 113 | 224 | Positive | | |
| CCGCAGAGTCTAGACTCGTGGTGGA | 114 | 241 | Positive | | |
| GTGGACTTCTCTCAATTTTCTAGGG | 115 | 261 | Positive | | |
| TGGACTTCTCTCAATTTTCTAGGGG | 116 | 262 | Positive | | |
| GGACTTCTCTCAATTTTCTAGGGGG | 117 | 263 | Positive | | |
| GACTTCTCTCAATTTTCTAGGGGGA | 118 | 264 | Positive | | |
| ACTTCTCTCAATTTTCTAGGGGGAA | 119 | 265 | Positive | | |
| CCAACTTGTCCTGGTTATCGCTGGA | 120 | 355 | Positive | | |
| TCATCTTCTTGTTGGTTCTTCTGGA | 121 | 428 | Positive | | |
| GCCCGTTTGTCCTCTAATTCCAGGA | 122 | 468 | Positive | | |
| CAGGATCCTCAACCACCAGCACGGG | 123 | 488 | Positive | | |
| AGGATCCTCAACCACCAGCACGGGA | 124 | 489 | Positive | | |
| ACCACCAGCACGGGACCATGCCGAA | 125 | 499 | Positive | | |
| AACCTGCATGACTACTGCTCAAGGA | 126 | 522 | Positive | | |
| ACCTGCATGACTACTGCTCAAGGAA | 127 | 523 | Positive | | |
| CCTGTTGCTGTACCAAACCTTCGGA | 128 | 563 | Positive | | |
| TTGCTGTACCAAACCTTCGGACGGA | 129 | 567 | Positive | | |
| TGCTGTACCAAACCTTCGGACGGAA | 130 | 568 | Positive | | |
| TGTATTCCCATCCCATCATCCTGGG | 131 | 601 | Positive | | |
| CATCCCATCATCCTGGGCTTTCGGA | 132 | 609 | Positive | | |
| ATCCCATCATCCTGGGCTTTCGGAA | 133 | 610 | Positive | | |
| TGGGCTTTCGGAAAATTCCTATGGG | 134 | 622 | Positive | | |
| GGGCTTTCGGAAAATTCCTATGGGA | 135 | 623 | Positive | | |
| GGCTTTCGGAAAATTCCTATGGGAG | 136 | 624 | Positive | | |
| TTCGGAAAATTCCTATGGGAGTGGG | 137 | 628 | Positive | | |
| GCCATTTGTTCAGTGGTTCGTAGGG | 138 | 687 | Positive | | |
| ACTGTTTGGCTTTCAGTTATATGGA | 139 | 721 | Positive | | |
| GTTATATGGATGATGTGGTATTGGG | 140 | 736 | Positive | | |
| TTATATGGATGATGTGGTATTGGGG | 141 | 737 | Positive | | |
| TATATGGATGATGTGGTATTGGGGG | 142 | 738 | Positive | | |
| GGCCAAGTCTGTACAGCATCTTGAG | 143 | 761 | Positive | | |
| TTACCAATTTTCTTTTGTCTTTGGG | 144 | 802 | Positive | | |
| ATTTAAACCCTAACAAAACAAAGAG | 145 | 832 | Positive | | |
| AACCCTAACAAAACAAAGAGATGGG | 146 | 837 | Positive | | |
| ACCCTAACAAAACAAAGAGATGGGG | 147 | 838 | Positive | | |
| CAAAGAGATGGGGTTACTCTCTGAA | 148 | 850 | Positive | | |
| GGGGTTACTCTCTGAATTTTATGGG | 149 | 859 | Positive | | |
| GAATTTTATGGGTTATGTCATTGGA | 150 | 872 | Positive | | |
| AATTTTATGGGTTATGTCATTGGAA | 151 | 873 | Positive | | |
| GGGTTATGTCATTGGAAGTTATGGG | 152 | 881 | Positive | | |
| AAGTTATGGGTCCTTGCCACAAGAA | 153 | 896 | Positive | | |
| ACACATCATACAAAAAATCAAAGAA | 154 | 920 | Positive | | |
| CAAAAAATCAAAGAATGTTTTAGAA | 155 | 930 | Positive | | |
| CCTATTAACAGGCCTATTGATTGGA | 156 | 960 | Positive | | |
| CTATTAACAGGCCTATTGATTGGAA | 157 | 961 | Positive | | |
| ATTGATTGGAAAGTATGTCAACGAA | 158 | 975 | Positive | | |
| GGAAAGTATGTCAACGAATTGTGGG | 159 | 982 | Positive | | |
| GTCAACGAATTGTGGGTCTTTTGGG | 160 | 991 | Positive | | |
| CCTTTCTGTGTAAACAATACCTGAA | 161 | 1117 | Positive | | |
| GCTGACGCAACCCCCACTGGCTGGG | 162 | 1188 | Positive | | |
| CTGACGCAACCCCCACTGGCTGGGG | 163 | 1189 | Positive | | |
| CCACTGGCTGGGGCTTGGTCATGGG | 164 | 1201 | Positive | | |
| CATGGGCCATCAGCGCGTGCGTGGA | 165 | 1220 | Positive | | |
| ATGGGCCATCAGCGCGTGCGTGGAA | 166 | 1221 | Positive | | |
| CTCCTCTGCCGATCCATACTGCGGA | 167 | 1255 | Positive | | |
| TCCTCTGCCGATCCATACTGCGGAA | 168 | 1256 | Positive | | |
| TTGTTTTGCTCGCAGCAGGTCTGGA | 169 | 1292 | Positive | | |
| TGTTTTGCTCGCAGCAGGTCTGGAG | 170 | 1293 | Positive | | |
| CAGGTCTGGAGCAAACATTATCGGG | 171 | 1307 | Positive | | |
| AGGTCTGGAGCAAACATTATCGGGA | 172 | 1308 | Positive | | |
| CTGCTAGGCTGTGCTGCCAACTGGA | 173 | 1380 | Positive | | |
| TGCTGCCAACTGGATCCTGCGCGGG | 174 | 1391 | Positive | | |
| GCTGCCAACTGGATCCTGCGCGGGA | 175 | 1392 | Positive | | |
| TTGTTTACGTCCCGTCGGCGCTGAA | 176 | 1423 | Positive | | |
| TCCCGTCGGCGCTGAATCCTGCGGA | 177 | 1432 | Positive | | |
| AATCCTGCGGACGACCCTTCTCGGG | 178 | 1446 | Positive | | |
| ATCCTGCGGACGACCCTTCTCGGGG | 179 | 1447 | Positive | | |
| ACGACCCTTCTCGGGGTCGCTTGGG | 180 | 1456 | Positive | | |
| CGACCCTTCTCGGGGTCGCTTGGGA | 181 | 1457 | Positive | | |
| GTCTGCCGTTCCGACCGACCACGGG | 182 | 1501 | Positive | | |
| TCTGCCGTTCCGACCGACCACGGGG | 183 | 1502 | Positive | | |
| CGGGGCGCACCTCTCTTTACGCGGA | 184 | 1522 | Positive | | |
| CGTCTGTGCCTTCTCATCTGCCGGA | 185 | 1552 | Positive | | |
| GCTTCACCTCTGCACGTCGCATGGA | 186 | 1590 | Positive | | |
| CTTCACCTCTGCACGTCGCATGGAG | 187 | 1591 | Positive | | |
| CACGTCGCATGGAGACCACCGTGAA | 188 | 1602 | Positive | | |
| GAGACCACCGTGAACGCCCACCGAA | 189 | 1613 | Positive | | |
| TGTTGCCCAAGGTCTTACATAAGAG | 190 | 1638 | Positive | | |
| TTGCCCAAGGTCTTACATAAGAGGA | 191 | 1640 | Positive | | |
| GGTCTTACATAAGAGGACTCTTGGA | 192 | 1648 | Positive | | |
| TGCAATGTCAACGACCGACCTTGAG | 193 | 1678 | Positive | | |
| AAAGACTGTTTGTTTAAAGACTGGG | 194 | 1712 | Positive | | |
| AAGACTGTTTGTTTAAAGACTGGGA | 195 | 1713 | Positive | | |
| AGACTGTTTGTTTAAAGACTGGGAG | 196 | 1714 | Positive | | |
| ACTGTTTGTTTAAAGACTGGGAGGA | 197 | 1716 | Positive | | |
| CTGTTTGTTTAAAGACTGGGAGGAG | 198 | 1717 | Positive | | |
| TGTTTAAAGACTGGGAGGAGTTGGG | 199 | 1722 | Positive | | |
| GTTTAAAGACTGGGAGGAGTTGGGG | 200 | 1723 | Positive | | |
| TTTAAAGACTGGGAGGAGTTGGGGG | 201 | 1724 | Positive | | |
| TTAAAGACTGGGAGGAGTTGGGGGA | 202 | 1725 | Positive | | |
| TAAAGACTGGGAGGAGTTGGGGGAG | 203 | 1726 | Positive | | |
| AAGACTGGGAGGAGTTGGGGGAGGA | 204 | 1728 | Positive | | |
| AGACTGGGAGGAGTTGGGGGAGGAG | 205 | 1729 | Positive | | |
| TAGATTAAAGGTCTTTGTACTAGGA | 206 | 1756 | Positive | | |
| AGATTAAAGGTCTTTGTACTAGGAG | 207 | 1757 | Positive | | |
| TCAAGCCTCCAAGCTGTGCCTTGGG | 208 | 1866 | Positive | Yes | |
| AAGCTGTGCCTTGGGTGGCTTTGGG | 209 | 1876 | Positive | Yes | Yes |
| AGCTGTGCCTTGGGTGGCTTTGGGG | 210 | 1877 | Positive | Yes | Yes |
| GCCTTGGGTGGCTTTGGGGCATGGA | 211 | 1883 | Positive | Yes | Yes |
| CATGGACATCGACCETTATAAAGAA | 212 | 1902 | Positive | Yes | Yes |
| CATCGACCCTTATAAAGAATTTGGA | 213 | 1908 | Positive | Yes | Yes |
| ATCGACCCTTATAAAGAATTTGGAG | 214 | 1909 | Positive | Yes | Yes |
| ATAAAGAATTTGGAGCTACTGTGGA | 215 | 1919 | Positive | Yes | Yes |
| TAAAGAATTTGGAGCTACTGTGGAG | 216 | 1920 | Positive | Yes | Yes |
| TCTGACTTCTTTCCTTCAGTACGAG | 217 | 1963 | Positive | Yes | Yes |
| GATACCGCCTCAGCTCTGTATCGGG | 218 | 1996 | Positive | Yes | |
| ATACCGCCTCAGCTCTGTATCGGGA | 219 | 1997 | Positive | Yes | |
| TACCGCCTCAGCTCTGTATCGGGAA | 220 | 1998 | Positive | Yes | |
| AGCTCTGTATCGGGAAGCCTTAGAG | 221 | 2007 | Positive | Yes | |
| TCGGGAAGCCTTAGAGTCTCCTGAG | 222 | 2016 | Positive | Yes | |
| CTCAGGCAAGCAATTCTTTGCTGGG | 223 | 2065 | Positive | Yes | |
| TCAGGCAAGCAATTCTTTGCTGGGG | 224 | 2066 | Positive | Yes | |
| CAGGCAAGCAATTCTTTGCTGGGGG | 225 | 2067 | Positive | Yes | |
| AGGCAAGCAATTCTTTGCTGGGGGG | 226 | 2068 | Positive | Yes | |
| GGCAAGCAATTCTTTGCTGGGGGGA | 227 | 2069 | Positive | Yes | |
| GCAAGCAATTCTTTGCTGGGGGGAA | 228 | 2070 | Positive | Yes | |
| GAACTAATGACTCTAGCTACCTGGG | 229 | 2092 | Positive | Yes | |
| TAATGACTCTAGCTACCTGGGTGGG | 230 | 2096 | Positive | Yes | |
| CTACCTGGGTGGGTGTTAATTTGGA | 231 | 2108 | Positive | Yes | |
| TACCTGGGTGGGTGTTAATTTGGAA | 232 | 2109 | Positive | Yes | |
| AATTTGGAAGATCCAGCATCTAGAG | 233 | 2125 | Positive | Yes | |
| TCAGTTATGTCAACACTAATATGGG | 234 | 2159 | Positive | Yes | |
| TCACATTTCTTGTCTCACTTTTGGA | 235 | 2211 | Positive | Yes | |
| CACATTTCTTGTCTCACTTTTGGAA | 236 | 2212 | Positive | Yes | |
| ATTTCTTGTCTCACTTTTGGAAGAG | 237 | 2215 | Positive | Yes | |
| TTCTTGTCTCACTTTTGGAAGAGAA | 238 | 2217 | Positive | Yes | |
| TTTTGGAAGAGAAACCGTTATAGAG | 239 | 2229 | Positive | Yes | |
| TATAGAGTATTTGGTGTCTTTCGGA | 240 | 2247 | Positive | Yes | |
| ATAGAGTATTTGGTGTCTTTCGGAG | 241 | 2248 | Positive | Yes | |
| TATTTGGTGTCTTTCGGAGTGTGGA | 242 | 2254 | Positive | Yes | |
| CCCCTATCCTATCAACACTTCCGGA | 243 | 2312 | Positive | Yes | |
| CCCTATCCTATCAACACTTCCGGAA | 244 | 2313 | Positive | Yes | |
| GAAACTACTGTTGTTAGACGACGAG | 245 | 2335 | Positive | Yes | |
| AGACGACGAGGCAGGTCCCCTAGAA | 246 | 2350 | Positive | Yes | |
| CGACGAGGCAGGTCCCCTAGAAGAA | 247 | 2353 | Positive | Yes | |
| CGAGGCAGGTCCCCTAGAAGAAGAA | 248 | 2356 | Positive | Yes | |
| AGAACTCCCTCGCCTCGCAGACGAA | 249 | 2377 | Positive | Yes | |
| AGGTCTCAATCGCCGCGTCGCAGAA | 250 | 2401 | Positive | Yes | |
| CGTCGCAGAAGATCTCAATCTCGGG | 251 | 2416 | Positive | Yes | |
| GTCGCAGAAGATCTCAATCTCGGGA | 252 | 2417 | Positive | Yes | |
| TCGCAGAAGATCTCAATCTCGGGAA | 253 | 2418 | Positive | Yes | |
| AACCTCAATGTTAGTATTCCTTGGA | 254 | 2441 | Positive | | |
| GTATTCCTTGGACTCATAAGGTGGG | 255 | 2454 | Positive | | |
| TATTCCTTGGACTCATAAGGTGGGG | 256 | 2455 | Positive | | |
| ATTCCTTGGACTCATAAGGTGGGGA | 257 | 2456 | Positive | | |
| TTCCTTGGACTCATAAGGTGGGGAA | 258 | 2457 | Positive | | |
| GTACCTGTCTTTAATCCTCATTGGA | 259 | 2507 | Positive | | |
| TACCTGTCTTTAATCCTCATTGGAA | 260 | 2508 | Positive | | |
| CCAAGACATTATCAAAAAATGTGAA | 261 | 2563 | Positive | | |
| TGTAGGCCCACTTACAGTTAATGAG | 262 | 2593 | Positive | | |
| TAGGCCCACTTACAGTTAATGAGAA | 263 | 2595 | Positive | | |
| CCACTTACAGTTAATGAGAAAAGAA | 264 | 2600 | Positive | | |
| AGGTTACCAAATATTTACCATTGGA | 265 | 2661 | Positive | | |
| CCAAATATTTACCATTGGATAAGGG | 266 | 2667 | Positive | | |
| GGGTATTAAACCTTATTATCCAGAA | 267 | 2689 | Positive | | |
| AGACACTATTTACACACTCTATGGA | 268 | 2741 | Positive | | |
| GACACTATTTACACACTCTATGGAA | 269 | 2742 | Positive | | |
| ATTTACACACTCTATGGAAGGCGGG | 270 | 2748 | Positive | | |
| GGAAGGCGGGTATATTATATAAGAG | 271 | 2763 | Positive | | |
| AAGGCGGGTATATTATATAAGAGAG | 272 | 2765 | Positive | | |
| GGCGGGTATATTATATAAGAGAGAA | 273 | 2767 | Positive | | |
| AACACATAGCGCCTCATTTTGTGGG | 274 | 2794 | Positive | | |
| TTTTGTGGGTCACCATATTCTTGGG | 275 | 2810 | Positive | | |
| TTTGTGGGTCACCATATTCTTGGGA | 276 | 2811 | Positive | | |
| TTGTGGGTCACCATATTCTTGGGAA | 277 | 2812 | Positive | | |
| TTGGGAACAAGATCTACAGCATGGG | 278 | 2830 | Positive | | |
| TGGGAACAAGATCTACAGCATGGGG | 279 | 2831 | Positive | | |
| ACAAGATCTACAGCATGGGGCAGAA | 280 | 2836 | Positive | | |
| ATCTTTCCACCAGCAATCCTCTGGG | 281 | 2860 | Positive | | |
| TCTTTCCACCAGCAATCCTCTGGGA | 282 | 2861 | Positive | | |
| GATTCTTTCCCGACCACCAGTTGGA | 283 | 2884 | Positive | | |
| CACCAGTTGGATCCAGCCTTCAGAG | 284 | 2898 | Positive | | |
| GCAAACACAGCAAATCCAGATTGGG | 285 | 2922 | Positive | | |
| CAAACACAGCAAATCCAGATTGGGA | 286 | 2923 | Positive | | |
| ATTGGGACTTCAATCCCAACAAGGA | 287 | 2941 | Positive | | |
| CTGGCCAGACGCCAACAAGGTAGGA | 288 | 2969 | Positive | | |
| TGGCCAGACGCCAACAAGGTAGGAG | 289 | 2970 | Positive | | |
| AGACGCCAACAAGGTAGGAGCTGGA | 290 | 2975 | Positive | | |
| GACGCCAACAAGGTAGGAGCTGGAG | 291 | 2976 | Positive | | |
| CAAGGTAGGAGCTGGAGCATTCGGG | 292 | 2984 | Positive | | |
| TAGGAGCTGGAGCATTCGGGCTGGG | 293 | 2989 | Positive | | |
| GCTGGGTTTCACCCCACCGCACGGA | 294 | 3008 | Positive | | |
| CTGGGTTTCACCCCACCGCACGGAG | 295 | 3009 | Positive | | |
| CCCCACCGCACGGAGGCCTTTTGGG | 296 | 3019 | Positive | | |
| CCCACCGCACGGAGGCCTTTTGGGG | 297 | 3020 | Positive | | |
| CCGCACGGAGGCCTTTTGGGGTGGA | 298 | 3024 | Positive | | |
| CGCACGGAGGCCTTTTGGGGTGGAG | 299 | 3025 | Positive | | |
| TGGGGTGGAGCCCTCAGGCTCAGGG | 300 | 3040 | Positive | | |
| TGCCTCCACCAATCGCCAGACAGGA | 301 | 3098 | Positive | | |
| GCCTCCACCAATCGCCAGACAGGAA | 302 | 3099 | Positive | | |
| CTACCCCGCTGTCTCCACCTTTGAG | 303 | 3130 | Positive | | |
| ACCCCGCTGTCTCCACCTTTGAGAA | 304 | 3132 | Positive | | |
| GAAAGGTTGTGGAATTT | 305 | 3167 | Negative | | |
| GTGAAAGGTTGTGGAATTC | 306 | 3165 | Negative | | |
| TTTGGTGAAAGGTTGTGGAATTA | 307 | 3161 | Negative | | |
| AGGATGAGTGTTTCTCAAAGGTGGA | 308 | 16 | Negative | | |
| GGATGAGTGTTTCTCAAAGGTGGAG | 309 | 17 | Negative | | |
| GTTTCTCAAAGGTGGAGACAGCGGG | 310 | 25 | Negative | | |
| TTTCTCAAAGGTGGAGACAGCGGGG | 311 | 26 | Negative | | |
| GCCTTCCTGTCTGGCGATTGGTGGA | 312 | 57 | Negative | | |
| CCTTCCTGTCTGGCGATTGGTGGAG | 313 | 58 | Negative | | |
| TGTCTGGCGATTGGTGGAGGCAGGA | 314 | 64 | Negative | | |
| GTCTGGCGATTGGTGGAGGCAGGAG | 315 | 65 | Negative | | |
| GCGATTGGTGGAGGCAGGAGGCGGA | 316 | 70 | Negative | | |
| GGCAAAGTTTGTAGTATGCCCTGAG | 317 | 101 | Negative | | |
| GTTTGTAGTATGCCCTGAGCCTGAG | 318 | 107 | Negative | | |
| TTGTAGTATGCCCTGAGCCTGAGGG | 319 | 109 | Negative | | |
| CCCCAAAAGGCCTCCGTGCGGTGGG | 320 | 139 | Negative | | |
| CCCAAAAGGCCTCCGTGCGGTGGGG | 321 | 140 | Negative | | |
| AAAGGCCTCCGTGCGGTGGGGTGAA | 322 | 144 | Negative | | |
| GCGGTGGGGTGAAACCCAGCCCGAA | 323 | 156 | Negative | | |
| CGTCTGGCCAGGTGTCCTTGTTGGG | 324 | 204 | Negative | | |
| GTCTGGCCAGGTGTCCTTGTTGGGA | 325 | 205 | Negative | | |
| GCCAGGTGTCCTTGTTGGGATTGAA | 326 | 210 | Negative | | |
| GTTGGGATTGAAGTCCCAATCTGGA | 327 | 223 | Negative | | |
| CTGGATTTGCTGTGTTTGCTCTGAA | 328 | 243 | Negative | | |
| TGCTGTGTTTGCTCTGAAGGCTGGA | 329 | 250 | Negative | | |
| AGGCTGGATCCAACTGGTGGTCGGG | 330 | 267 | Negative | | |
| GGCTGGATCCAACTGGTGGTCGGGA | 331 | 268 | Negative | | |
| GCTGGATCCAACTGGTGGTCGGGAA | 332 | 269 | Negative | | |
| GATCCAACTGGTGGTCGGGAAAGAA | 333 | 273 | Negative | | |
| TGGTGGTCGGGAAAGAATCCCAGAG | 334 | 281 | Negative | | |
| GTGGTCGGGAAAGAATCCCAGAGGA | 335 | 283 | Negative | | |
| AGAATCCCAGAGGATTGCTGGTGGA | 336 | 294 | Negative | | |
| GAATCCCAGAGGATTGCTGGTGGAA | 337 | 295 | Negative | | |
| ATGCTGTAGATCTTGTTCCCAAGAA | 338 | 332 | Negative | | |
| AGAATATGGTGACCCACAAAATGAG | 339 | 353 | Negative | | |
| TATAATATACCCGCCTTCCATAGAG | 340 | 402 | Negative | | |
| GTGTGTAAATAGTGTCTAGTTTGGA | 341 | 426 | Negative | | |
| TGTGTAAATAGTGTCTAGTTTGGAA | 342 | 427 | Negative | | |
| GTAATGATTAACTAGATGTTCTGGA | 343 | 452 | Negative | | |
| TGGTAAATATTTGGTAACCTTTGGA | 344 | 503 | Negative | | |
| TCTTTTCTCATTAACTGTAAGTGGG | 345 | 560 | Negative | | |
| GTCTTGGTGTAAATGTATATTAGGA | 346 | 614 | Negative | | |
| TCTTGGTGTAAATGTATATTAGGAA | 347 | 615 | Negative | | |
| GGAAAAGATGGTGTTTTCCAATGAG | 348 | 636 | Negative | | |
| AAAAGATGGTGTTTTCCAATGAGGA | 349 | 638 | Negative | | |
| AGGATTAAAGACAGGTACAGTAGAA | 350 | 659 | Negative | | |
| ATTAAAGACAGGTACAGTAGAAGAA | 351 | 662 | Negative | | |
| CCAGTAAAGTTCCCCACCTTATGAG | 352 | 693 | Negative | | |
| GTTCCCCACCTTATGAGTCCAAGGA | 353 | 701 | Negative | | |
| TTCCCCACCTTATGAGTCCAAGGAA | 354 | 702 | Negative | | |
| GAGTCCAAGGAATACTAACATTGAG | 355 | 715 | Negative | | |
| GAATACTAACATTGAGGTTCCCGAG | 356 | 724 | Negative | | |
| TAACATTGAGGTTCCCGAGATTGAG | 357 | 730 | Negative | Yes | |
| GATCTTCTGCGACGCGGCGATTGAG | 358 | 754 | Negative | Yes | |
| GGCGATTGAGACCTTCGTCTGCGAG | 359 | 769 | Negative | Yes | |
| TTGAGACCTTCGTCTGCGAGGCGAG | 360 | 774 | Negative | Yes | |
| GAGACCTTCGTCTGCGAGGCGAGGG | 361 | 776 | Negative | Yes | |
| AGACCTTCGTCTGCGAGGCGAGGGA | 362 | 777 | Negative | Yes | |
| GACCTTCGTCTGCGAGGCGAGGGAG | 363 | 778 | Negative | Yes | |
| AGGCGAGGGAGTTCTTCTTCTAGGG | 364 | 792 | Negative | Yes | |
| GGCGAGGGAGTTCTTCTTCTAGGGG | 365 | 793 | Negative | Yes | |
| GCGAGGGAGTTCTTCTTCTAGGGGA | 366 | 794 | Negative | Yes | |
| TCGTCTAACAACAGTAGTTTCCGGA | 367 | 828 | Negative | Yes | |
| CGTCTAACAACAGTAGTTTCCGGAA | 368 | 829 | Negative | Yes | |
| GTAGTTTCCGGAAGTGTTGATAGGA | 369 | 841 | Negative | Yes | |
| TTCCGGAAGTGTTGATAGGATAGGG | 370 | 846 | Negative | Yes | |
| TCCGGAAGTGTTGATAGGATAGGGG | 371 | 847 | Negative | Yes | |
| GGCATTTGGTGGTCTATAAGCTGGA | 372 | 870 | Negative | Yes | |
| GCATTTGGTGGTCTATAAGCTGGAG | 373 | 871 | Negative | Yes | |
| ATTTGGTGGTCTATAAGCTGGAGGA | 374 | 873 | Negative | Yes | |
| TTTGGTGGTCTATAAGCTGGAGGAG | 375 | 874 | Negative | Yes | |
| GGTCTATAAGCTGGAGGAGTGCGAA | 376 | 880 | Negative | Yes | |
| GAGGAGTGCGAATCCACACTCCGAA | 377 | 893 | Negative | Yes | |
| TAACGGTTTCTCTTCCAAAAGTGAG | 378 | 935 | Negative | Yes | |
| TTCTCTTCCAAAAGTGAGACAAGAA | 379 | 942 | Negative | Yes | |
| CCAAAAGTGAGACAAGAAATGTGAA | 380 | 949 | Negative | Yes | |
| GACAAGAAATGTGAAACCACAAGAG | 381 | 959 | Negative | Yes | |
| TGTGAAACCACAAGAGTTGCCTGAA | 382 | 968 | Negative | Yes | |
| GACTACTAGGTCTCTAGATGCTGGA | 383 | 1023 | Negative | Yes | |
| TTAACACCCACCCAGGTAGCTAGAG | 384 | 1057 | Negative | Yes | |
| GTCATTAGTTCCCCCCAGCAAAGAA | 385 | 1081 | Negative | Yes | |
| CCCAGCAAAGAATTGCTTGCCTGAG | 386 | 1094 | Negative | Yes | |
| GCTTGCCTGAGTGCAGTATGGTGAG | 387 | 1108 | Negative | Yes | |
| CCTGAGTGCAGTATGGTGAGGTGAA | 388 | 1113 | Negative | Yes | |
| ATGGTGAGGTGAACAATGCTCAGGA | 389 | 1125 | Negative | Yes | |
| TGGTGAGGTGAACAATGCTCAGGAG | 390 | 1126 | Negative | Yes | |
| GACTCTAAGGCTTCCCGATACAGAG | 391 | 1150 | Negative | Yes | |
| TAAGGCTTCCCGATACAGAGCTGAG | 392 | 1155 | Negative | Yes | |
| TACAGAGCTGAGGCGGTATCTAGAA | 393 | 1168 | Negative | Yes | |
| GGTATCTAGAAGATCTCGTACTGAA | 394 | 1182 | Negative | Yes | |
| ATCTAGAAGATCTCGTACTGAAGGA | 395 | 1185 | Negative | Yes | |
| TCTAGAAGATCTCGTACTGAAGGAA | 396 | 1186 | Negative | Yes | |
| GAAGATCTCGTACTGAAGGAAAGAA | 397 | 1190 | Negative | Yes | |
| TCGTACTGAAGGAAAGAAGTCAGAA | 398 | 1197 | Negative | Yes | |
| AAAGAAGTCAGAAGGCAAAAACGAG | 399 | 1209 | Negative | Yes | |
| AGAAGTCAGAAGGCAAAAACGAGAG | 400 | 1211 | Negative | Yes | Yes |
| AGTAGCTCCAAATTCTTTATAAGGG | 401 | 1245 | Negative | Yes | Yes |
| AAAGCCACCCAAGGCACAGCTTGGA | 402 | 1286 | Negative | Yes | Yes |
| AAGCCACCCAAGGCACAGCTTGGAG | 403 | 1287 | Negative | Yes | Yes |
| CCAAGGCACAGCTTGGAGGCTTGAA | 404 | 1294 | Negative | Yes | Yes |
| CAGCTTGGAGGCTTGAACAGTAGGA | 405 | 1302 | Negative | Yes | Yes |
| GGAGGCTTGAACAGTAGGACATGAA | 406 | 1308 | Negative | Yes | Yes |
| TTGAACAGTAGGACATGAACAAGAG | 407 | 1314 | Negative | Yes | |
| ATGAACAAGAGATGATTAGGCAGAG | 408 | 1328 | Negative | Yes | |
| CAAGAGATGATTAGGCAGAGGTGAA | 409 | 1333 | Negative | Yes | |
| AGTCTTTAAACAAACAGTCTTTGAA | 410 | 1450 | Negative | | |
| AAGGTCGGTCGTTGACATTGCAGAG | 411 | 1484 | Negative | | |
| GGTCGGTCGTTGACATTGCAGAGAG | 412 | 1486 | Negative | | |
| GTTGACATTGCAGAGAGTCCAAGAG | 413 | 1494 | Negative | | |
| GAGTCCTCTTATGTAAGACCTTGGG | 414 | 1516 | Negative | | |
| AAGACCTTGGGCAACATTCGGTGGG | 415 | 1530 | Negative | | |
| GGTGGTCTCCATGCGACGTGCAGAG | 416 | 1562 | Negative | | |
| TCTCCATGCGACGTGCAGAGGTGAA | 417 | 1567 | Negative | | |
| ATGCGACGTGCAGAGGTGAAGCGAA | 418 | 1572 | Negative | | |
| AAGTGCACACGGTCCGGCAGATGAG | 419 | 1595 | Negative | | |
| GTGCACACGGTCCGGCAGATGAGAA | 420 | 1597 | Negative | | |
| CGGCAGATGAGAAGGCACAGACGGG | 421 | 1609 | Negative | | |
| GGCAGATGAGAAGGCACAGACGGGG | 422 | 1610 | Negative | | |
| GCAGATGAGAAGGCACAGACGGGGA | 423 | 1611 | Negative | | |
| CAGATGAGAAGGCACAGACGGGGAG | 424 | 1612 | Negative | | |
| ACAGACGGGGAGTCCGCGTAAAGAG | 425 | 1625 | Negative | | |
| AGACGGGGAGTCCGCGTAAAGAGAG | 426 | 1627 | Negative | | |
| GAGGTGCGCCCCGTGGTCGGTCGGA | 427 | 1649 | Negative | | |
| AGGTGCGCCCCGTGGTCGGTCGGAA | 428 | 1650 | Negative | | |
| GTGGTCGGTCGGAACGGCAGACGGA | 429 | 1661 | Negative | | |
| TGGTCGGTCGGAACGGCAGACGGAG | 430 | 1662 | Negative | | |
| GTCGGTCGGAACGGCAGACGGAGAA | 431 | 1664 | Negative | | |
| GGTCGGAACGGCAGACGGAGAAGGG | 432 | 1667 | Negative | | |
| GTCGGAACGGCAGACGGAGAAGGGG | 433 | 1668 | Negative | | |
| TCGGAACGGCAGACGGAGAAGGGGA | 434 | 1669 | Negative | | |
| AACGGCAGACGGAGAAGGGGACGAG | 435 | 1673 | Negative | | |
| CGGCAGACGGAGAAGGGGACGAGAG | 436 | 1675 | Negative | | |
| GCAGACGGAGAAGGGGACGAGAGAG | 437 | 1677 | Negative | | |
| CGAGAGAGTCCCAAGCGACCCCGAG | 438 | 1694 | Negative | | |
| AGAGAGTCCCAAGCGACCCCGAGAA | 439 | 1696 | Negative | | |
| GAGTCCCAAGCGACCCCGAGAAGGG | 440 | 1699 | Negative | | |
| ACCCCGAGAAGGGTCGTCCGCAGGA | 441 | 1711 | Negative | | |
| GTCCGCAGGATTCAGCGCCGACGGG | 442 | 1726 | Negative | | |
| TCCGCAGGATTCAGCGCCGACGGGA | 443 | 1727 | Negative | | |
| GCGCCGACGGGACGTAAACAAAGGA | 444 | 1740 | Negative | | |
| TAAACAAAGGACGTCCCGCGCAGGA | 445 | 1754 | Negative | | |
| GGCAGCACAGCCTAGCAGCCATGGA | 446 | 1786 | Negative | | |
| CATGGATACGATGTATATTTGCGGG | 447 | 1805 | Negative | | |
| ATGGATACGATGTATATTTGCGGGA | 448 | 1806 | Negative | | |
| TGGATACGATGTATATTTGCGGGAG | 449 | 1807 | Negative | | |
| GATACGATGTATATTTGCGGGAGAG | 450 | 1809 | Negative | | |
| TACGATGTATATTTGCGGGAGAGGA | 451 | 1811 | Negative | | |
| ATATTTGCGGGAGAGGACAACAGAG | 452 | 1819 | Negative | | |
| ATGTTTGCTCCAGACCTGCTGCGAG | 453 | 1859 | Negative | | |
| CTGCGAGCAAAACAAGCGGCTAGGA | 454 | 1877 | Negative | | |
| TGCGAGCAAAACAAGCGGCTAGGAG | 455 | 1878 | Negative | | |
| GCGGCTAGGAGTTCCGCAGTATGGA | 456 | 1892 | Negative | | |
| AGTTCCGCAGTATGGATCGGCAGAG | 457 | 1901 | Negative | | |
| TTCCGCAGTATGGATCGGCAGAGGA | 458 | 1903 | Negative | | |
| TCCGCAGTATGGATCGGCAGAGGAG | 459 | 1904 | Negative | | |
| AGTATGGATCGGCAGAGGAGCCGAA | 460 | 1909 | Negative | | |
| CCATGACCAAGCCCCAGCCAGTGGG | 461 | 1959 | Negative | | |
| CATGACCAAGCCCCAGCCAGTGGGG | 462 | 1960 | Negative | | |
| ATGACCAAGCCCCAGCCAGTGGGGG | 463 | 1961 | Negative | | |
| TGGCACAGACCTGGCCGTTGCCGGG | 464 | 2003 | Negative | | |
| GACCTGGCCGTTGCCGGGCAACGGG | 465 | 2010 | Negative | | |
| ACCTGGCCGTTGCCGGGCAACGGGG | 466 | 2011 | Negative | | |
| AGGTTCAGGTATTGTTTACACAGAA | 467 | 2039 | Negative | | |
| CAGAAAGGCCTTGTAAGTTGGCGAG | 468 | 2059 | Negative | | |
| GAAAGGCCTTGTAAGTTGGCGAGAA | 469 | 2061 | Negative | | |
| CCTTGTAAGTTGGCGAGAAAGTGAA | 470 | 2067 | Negative | | |
| AAAGTGAAAGCCTGCTTAGATTGAA | 471 | 2084 | Negative | | |
| TAGATTGAATACATGCATACAAGGG | 472 | 2100 | Negative | | |
| TGCATACAAGGGCATTAACGCAGGA | 473 | 2113 | Negative | | |
| AGGATAACCACATTGTGTAAATGGG | 474 | 2134 | Negative | | |
| GGATAACCACATTGTGTAAATGGGG | 475 | 2135 | Negative | | |
| CCAATCAATAGGCCTGTTAATAGGA | 476 | 2200 | Negative | | |
| CAATCAATAGGCCTGTTAATAGGAA | 477 | 2201 | Negative | | |
| GTATGATGTGTTCTTGTGGCAAGGA | 478 | 2253 | Negative | | |
| ATGACATAACCCATAAAATTCAGAG | 479 | 2291 | Negative | | |
| GACATAACCCATAAAATTCAGAGAG | 480 | 2293 | Negative | | |
| ACCCCATCTCTTTGTTTTGTTAGGG | 481 | 2320 | Negative | | |
| AAATGTATACCCAAAGACAAAAGAA | 482 | 2348 | Negative | | |
| AAATTGGTAACAGCGGTAAAAAGGG | 483 | 2372 | Negative | | |
| AATTGGTAACAGCGGTAAAAAGGGA | 484 | 2373 | Negative | | |
| ATACCACATCATCCATATAACTGAA | 485 | 2427 | Negative | | |
| ATATAACTGAAAGCCAAACAGTGGG | 486 | 2441 | Negative | | |
| TATAACTGAAAGCCAAACAGTGGGG | 487 | 2442 | Negative | | |
| ATAACTGAAAGCCAAACAGTGGGGG | 488 | 2443 | Negative | | |
| TAACTGAAAGCCAAACAGTGGGGGA | 489 | 2444 | Negative | | |
| AACTGAAAGCCAAACAGTGGGGGAA | 490 | 2445 | Negative | | |
| AAACAGTGGGGGAAAGCCCTACGAA | 491 | 2456 | Negative | | |
| GGGGAAAGCCCTACGAACCACTGAA | 492 | 2464 | Negative | | |
| GAACAAATGGCACTAGTAAACTGAG | 493 | 2486 | Negative | | |
| ATGGCACTAGTAAACTGAGCCAGGA | 494 | 2492 | Negative | | |
| TGGCACTAGTAAACTGAGCCAGGAG | 495 | 2493 | Negative | | |
| GCACTAGTAAACTGAGCCAGGAGAA | 496 | 2495 | Negative | | |
| AGTAAACTGAGCCAGGAGAAACGGG | 497 | 2500 | Negative | | |
| ACTGAGCCAGGAGAAACGGGCTGAG | 498 | 2505 | Negative | | |
| CGGGCTGAGGCCCACTCCCATAGGA | 499 | 2521 | Negative | | |
| GGGCTGAGGCCCACTCCCATAGGAA | 500 | 2522 | Negative | | |
| CCCACTCCCATAGGAATTTTCCGAA | 501 | 2531 | Negative | | |
| ATAGGAATTTTCCGAAAGCCCAGGA | 502 | 2540 | Negative | | |
| TTTTCCGAAAGCCCAGGATGATGGG | 503 | 2547 | Negative | | |
| TTTCCGAAAGCCCAGGATGATGGGA | 504 | 2548 | Negative | | |
| CGAAAGCCCAGGATGATGGGATGGG | 505 | 2552 | Negative | | |
| GAAAGCCCAGGATGATGGGATGGGA | 506 | 2553 | Negative | | |
| AAAGCCCAGGATGATGGGATGGGAA | 507 | 2554 | Negative | | |
| AATACAGGTGCAATTTCCGTCCGAA | 508 | 2577 | Negative | | |
| CCGAAGGTTTGGTACAGCAACAGGA | 509 | 2597 | Negative | | |
| CGAAGGTTTGGTACAGCAACAGGAG | 510 | 2598 | Negative | | |
| AAGGTTTGGTACAGCAACAGGAGGG | 511 | 2600 | Negative | | |
| AGGTTTGGTACAGCAACAGGAGGGA | 512 | 2601 | Negative | | |
| ACAGCAACAGGAGGGATACATAGAG | 513 | 2610 | Negative | | |
| GAGGGATACATAGAGGTTCCTTGAG | 514 | 2620 | Negative | | |
| GCATGGTCCCGTGCTGGTGGTTGAG | 515 | 2664 | Negative | | |
| ATGGTCCCGTGCTGGTGGTTGAGGA | 516 | 2666 | Negative | | |
| CGTGCTGGTGGTTGAGGATCCTGGA | 517 | 2673 | Negative | | |
| GTGCTGGTGGTTGAGGATCCTGGAA | 518 | 2674 | Negative | | |
| GTGGTTGAGGATCCTGGAATTAGAG | 519 | 2680 | Negative | | |
| GGTTGAGGATCCTGGAATTAGAGGA | 520 | 2682 | Negative | | |
| ATCCTGGAATTAGAGGACAAACGGG | 521 | 2690 | Negative | | |
| GGCAACATACCTTGATAGTCCAGAA | 522 | 2713 | Negative | | |
| AACATACCTTGATAGTCCAGAAGAA | 523 | 2716 | Negative | | |
| GATAGTCCAGAAGAACCAACAAGAA | 524 | 2726 | Negative | | |
| CCAGAAGAACCAACAAGAAGATGAG | 525 | 2732 | Negative | | |
| AAGAAGATGAGGCATAGCAGCAGGA | 526 | 2746 | Negative | | |
| AGATGAGGCATAGCAGCAGGATGAA | 527 | 2750 | Negative | | |
| TGAGGCATAGCAGCAGGATGAAGAG | 528 | 2753 | Negative | | |
| AGGCATAGCAGCAGGATGAAGAGGA | 529 | 2755 | Negative | | |
| GGCATAGCAGCAGGATGAAGAGGAA | 530 | 2756 | Negative | | |
| CAGACACATCCAGCGATAACCAGGA | 531 | 2796 | Negative | | |
| CCAGCGATAACCAGGACAAGTTGGA | 532 | 2805 | Negative | | |
| CAGCGATAACCAGGACAAGTTGGAG | 533 | 2806 | Negative | | |
| GCGATAACCAGGACAAGTTGGAGGA | 534 | 2808 | Negative | | |
| AACCAGGACAAGTTGGAGGACAGGA | 535 | 2813 | Negative | | |
| ACCAGGACAAGTTGGAGGACAGGAG | 536 | 2814 | Negative | | |
| AGTTGGAGGACAGGAGGTTGGTGAG | 537 | 2823 | Negative | | |
| GACAGGAGGTTGGTGAGTGATTGGA | 538 | 2831 | Negative | | |
| ACAGGAGGTTGGTGAGTGATTGGAG | 539 | 2832 | Negative | | |
| GGTTGGTGAGTGATTGGAGGTTGGG | 540 | 2838 | Negative | | |
| GTTGGTGAGTGATTGGAGGTTGGGG | 541 | 2839 | Negative | | |
| TTGGTGAGTGATTGGAGGTTGGGGA | 542 | 2840 | Negative | | |
| GTGATTGGAGGTTGGGGACTGCGAA | 543 | 2847 | Negative | | |
| AGACACACGGTAGTTCCCCCTAGAA | 544 | 2881 | Negative | | |
| CGGTAGTTCCCCCTAGAAAATTGAG | 545 | 2888 | Negative | | |
| GTAGTTCCCCCTAGAAAATTGAGAG | 546 | 2890 | Negative | | |
| AGTTCCCCCTAGAAAATTGAGAGAA | 547 | 2892 | Negative | | |
| AAAATTGAGAGAAGTCCACCACGAG | 548 | 2904 | Negative | | |
| AGTCTAGACTCTGCGGTATTGTGAG | 549 | 2927 | Negative | | |
| TCTAGACTCTGCGGTATTGTGAGGA | 550 | 2929 | Negative | | |
| TTGTGAGGATTCTTGTCAACAAGAA | 551 | 2945 | Negative | | |
| AGAAAAACCCCGCCTGTAACACGAG | 552 | 2966 | Negative | | |
| AAAAACCCCGCCTGTAACACGAGAA | 553 | 2968 | Negative | | |
| AACCCCGCCTGTAACACGAGAAGGG | 554 | 2971 | Negative | | |
| ACCCCGCCTGTAACACGAGAAGGGG | 555 | 2972 | Negative | | |
| TGTAACACGAGAAGGGGTCCTAGGA | 556 | 2980 | Negative | | |
| GTAACACGAGAAGGGGTCCTAGGAA | 557 | 2981 | Negative | | |
| GATGTTCTCCATGTTCAGCGCAGGG | 558 | 3015 | Negative | | |
| CAGCGCAGGGTCCCCAATCCTCGAG | 559 | 3030 | Negative | | |
| GCGCAGGGTCCCCAATCCTCGAGAA | 560 | 3032 | Negative | | |
| TCCTCGAGAAGATTGACGATAAGGG | 561 | 3047 | Negative | | |
| CCTCGAGAAGATTGACGATAAGGGA | 562 | 3048 | Negative | | |
| CTCGAGAAGATTGACGATAAGGGAG | 563 | 3049 | Negative | | |
| CGAGAAGATTGACGATAAGGGAGAG | 564 | 3051 | Negative | | |
| CGATAAGGGAGAGGCAGTAGTCGGA | 565 | 3063 | Negative | | |
| GATAAGGGAGAGGCAGTAGTCGGAA | 566 | 3064 | Negative | | |
| GGGAGAGGCAGTAGTCGGAACAGGG | 567 | 3069 | Negative | | |
| CGGAACAGGGTTTACTGCTCCTGAA | 568 | 3084 | Negative | | |
| CAGGGTTTACTGCTCCTGAACTGGA | 569 | 3089 | Negative | | |
| AGGGTTTACTGCTCCTGAACTGGAG | 570 | 3090 | Negative | | |
| TCCTGAACTGGAGCCACCAGCAGGG | 571 | 3102 | Negative | | |
| CCTGAACTGGAGCCACCAGCAGGGA | 572 | 3103 | Negative | | |
| CTGAACTGGAGCCACCAGCAGGGAA | 573 | 3104 | Negative | | |
| GGAAATACAGGCCTCTCACTCTGGG | 574 | 3125 | Negative | | |
| GAAATACAGGCCTCTCACTCTGGGA | 575 | 3126 | Negative | | |

TABLE 9
SpCas9 sgRNAs

| | SEQ | | | | |
|---|---|---|---|---|---|
| | ID | nt | | | Close to |
| 20 nt guide + 3 nt PAM | NO: | Start | Sense | Core? | G17? |
| AACCTTTCACCAAACTCTGCAAG | 576 | 7 | Positive | | |
| CACCAAACTCTGCAAGATCCCAG | 577 | 14 | Positive | | |
| CCAAACTCTGCAAGATCCCAGAG | 578 | 16 | Positive | | |
| ACTCTGCAAGATCCCAGAGTGAG | 579 | 20 | Positive | | |
| TCTGCAAGATCCCAGAGTGAGAG | 580 | 22 | Positive | | |
| CTGCAAGATCCCAGAGTGAGAGG | 581 | 23 | Positive | | |
| AGAGGCCTGTATTTCCCTGCTGG | 582 | 41 | Positive | | |
| GGCCTGTATTTCCCTGCTGGTGG | 583 | 44 | Positive | | |
| TATTTCCCTGCTGGTGGCTCCAG | 584 | 50 | Positive | | |
| CCCTGCTGGTGGCTCCAGTTCAG | 585 | 55 | Positive | | |
| CCTGCTGGTGGCTCCAGTTCAGG | 586 | 56 | Positive | | |
| TGCTGGTGGCTCCAGTTCAGGAG | 587 | 58 | Positive | | |
| TGGTGGCTCCAGTTCAGGAGCAG | 588 | 61 | Positive | | |
| CCCTTATCGTCAATCTTCTCGAG | 589 | 110 | Positive | | |
| CCTTATCGTCAATCTTCTCGAGG | 590 | 111 | Positive | | |
| TCGTCAATCTTCTCGAGGATTGG | 591 | 116 | Positive | | |
| CGTCAATCTTCTCGAGGATTGGG | 592 | 117 | Positive | | |
| GTCAATCTTCTCGAGGATTGGGG | 593 | 118 | Positive | | |
| TGGGGACCCTGCGCTGAACATGG | 594 | 136 | Positive | | |
| GGGACCCTGCGCTGAACATGGAG | 595 | 138 | Positive | | |
| GAACATGGAGAACATCACATCAG | 596 | 151 | Positive | | |
| AACATGGAGAACATCACATCAGG | 597 | 152 | Positive | | |
| GAACATCACATCAGGATTCCTAG | 598 | 160 | Positive | | |
| AACATCACATCAGGATTCCTAGG | 599 | 161 | Positive | | |
| TAGGACCCCTTCTCGTGTTACAG | 600 | 180 | Positive | | |
| AGGACCCCTTCTCGTGTTACAGG | 601 | 181 | Positive | | |
| ACCCCTTCTCGTGTTACAGGCGG | 602 | 184 | Positive | | |
| CCCCTTCTCGTGTTACAGGCGGG | 603 | 185 | Positive | | |
| CCCTTCTCGTGTTACAGGCGGGG | 604 | 186 | Positive | | |
| GCGGGGTTTTTCTTGTTGACAAG | 605 | 203 | Positive | | |
| CAAGAATCCTCACAATACCGCAG | 606 | 222 | Positive | | |
| AGAATCCTCACAATACCGCAGAG | 607 | 224 | Positive | | |
| CCTCACAATACCGCAGAGTCTAG | 608 | 229 | Positive | | |
| TACCGCAGAGTCTAGACTCGTGG | 609 | 237 | Positive | | |
| CGCAGAGTCTAGACTCGTGGTGG | 610 | 240 | Positive | | |
| GTGGACTTCTCTCAATTTTCTAG | 611 | 259 | Positive | | |
| TGGACTTCTCTCAATTTTCTAGG | 612 | 260 | Positive | | |
| GGACTTCTCTCAATTTTCTAGGG | 613 | 26 | Positive | | |
| GACTTCTCTCAATTTTCTAGGGG | 614 | 262 | Positive | | |
| ACTTCTCTCAATTTTCTAGGGGG | 615 | 263 | Positive | | |
| GGGGGAACTACCGTGTGTCTTGG | 616 | 281 | Positive | | |
| TGTGTCTTGGCCAAAATTCGCAG | 617 | 294 | Positive | | |
| TCCTGTCCTCCAACTTGTCCTGG | 618 | 344 | Positive | | |
| CAACTTGTCCTGGTTATCGCTGG | 619 | 354 | Positive | | |
| GTTATCGCTGGATGTGTCTGCGG | 620 | 366 | Positive | | |
| GCTATGCCTCATCTTCTTGTTGG | 621 | 418 | Positive | | |
| CATCTTCTTGTTGGTTCTTCTGG | 622 | 427 | Positive | | |
| GTTGGTTCTTCTGGACTATCAAG | 623 | 436 | Positive | | |
| TTGGTTCTTCTGGACTATCAAGG | 624 | 437 | Positive | | |
| GCCCGTTTGTCCTCTAATTCCAG | 625 | 466 | Positive | | |
| CCCGTTTGTCCTCTAATTCCAGG | 626 | 467 | Positive | | |
| ATTCCAGGATCCTCAACCACCAG | 627 | 482 | Positive | | |
| AGGATCCTCAACCACCAGCACGG | 628 | 487 | Positive | | |
| GGATCCTCAACCACCAGCACGGG | 629 | 488 | Positive | | |
| AACCTGCATGACTACTGCTCAAG | 630 | 520 | Positive | | |
| ACCTGCATGACTACTGCTCAAGG | 631 | 521 | Positive | | |
| CTGTTGCTGTACCAAACCTTCGG | 632 | 562 | Positive | | |
| TGCTGTACCAAACCTTCGGACGG | 633 | 566 | Positive | | |
| GTATTCCCATCCCATCATCCTGG | 634 | 600 | Positive | | |
| TATTCCCATCCCATCATCCTGGG | 635 | 601 | Positive | | |
| ATCCCATCATCCTGGGCTTTCGG | 636 | 608 | Positive | | |
| GGGCTTTCGGAAAATTCCTATGG | 637 | 621 | Positive | | |
| GGCTTTCGGAAAATTCCTATGGG | 638 | 622 | Positive | | |
| CTTTCGGAAAATTCCTATGGGAG | 639 | 624 | Positive | | |
| TCGGAAAATTCCTATGGGAGTGG | 640 | 627 | Positive | | |
| CGGAAAATTCCTATGGGAGTGGG | 641 | 628 | Positive | | |
| ATTCCTATGGGAGTGGGCCTCAG | 642 | 634 | Positive | | |
| GGGCCTCAGCCCGTTTCTCCTGG | 643 | 648 | Positive | | |
| TCAGCCCGTTTCTCCTGGCTCAG | 644 | 653 | Positive | | |
| TTTCTCCTGGCTCAGTTTACTAG | 645 | 661 | Positive | | |
| GTTTACTAGTGCCATTTGTTCAG | 646 | 675 | Positive | | |
| TACTAGTGCCATTTGTTCAGTGG | 647 | 678 | Positive | | |
| GCCATTTGTTCAGTGGTTCGTAG | 648 | 685 | Positive | | |
| CCATTTGTTCAGTGGTTCGTAGG | 649 | 686 | Positive | | |
| CATTTGTTCAGTGGTTCGTAGGG | 650 | 687 | Positive | | |
| TAGGGCTTTCCCCCACTGTTTGG | 651 | 705 | Positive | | |
| TTCCCCCACTGTTTGGCTTTCAG | 652 | 712 | Positive | | |
| CTGTTTGGCTTTCAGTTATATGG | 653 | 720 | Positive | | |
| TTTCAGTTATATGGATGATGTGG | 654 | 729 | Positive | | |
| TTATATGGATGATGTGGTATTGG | 655 | 735 | Positive | | |
| TATATGGATGATGTGGTATTGGG | 656 | 736 | Positive | | |
| ATATGGATGATGTGGTATTGGGG | 657 | 737 | Positive | | |
| TATGGATGATGTGGTATTGGGGG | 658 | 738 | Positive | | |
| ATGATGTGGTATTGGGGGCCAAG | 659 | 743 | Positive | | |
| TATTGGGGGCCAAGTCTGTACAG | 660 | 752 | Positive | | |
| CCAAGTCTGTACAGCATCTTGAG | 661 | 761 | Positive | | |
| TACCAATTTTCTTTTGTCTTTGG | 662 | 801 | Positive | | |
| ACCAATTTTCTTTTGTCTTTGGG | 663 | 802 | Positive | | |
| ATTTAAACCCTAACAAAACAAAG | 664 | 830 | Positive | | |
| TTAAACCCTAACAAAACAAAGAG | 665 | 832 | Positive | | |
| ACCCTAACAAAACAAAGAGATGG | 666 | 836 | Positive | | |
| CCCTAACAAAACAAAGAGATGGG | 667 | 837 | Positive | | |
| CCTAACAAAACAAAGAGATGGGG | 668 | 838 | Positive | | |
| GGGTTACTCTCTGAATTTTATGG | 669 | 858 | Positive | | |
| GGTTACTCTCTGAATTTTATGGG | 670 | 859 | Positive | | |
| AATTTTATGGGTTATGTCATTGG | 671 | 871 | Positive | | |
| TTTATGGGTTATGTCATTGGAAG | 672 | 874 | Positive | | |
| GGTTATGTCATTGGAAGTTATGG | 673 | 880 | Positive | | |
| GTTATGTCATTGGAAGTTATGGG | 674 | 881 | Positive | | |
| AAGTTATGGGTCCTTGCCACAAG | 675 | 894 | Positive | | |
| ACACATCATACAAAAAATCAAAG | 676 | 918 | Positive | | |
| CAAAAAATCAAAGAATGTTTTAG | 677 | 928 | Positive | | |
| TTTAGAAAACTTCCTATTAACAG | 678 | 946 | Positive | | |
| TTAGAAAACTTCCTATTAACAGG | 679 | 947 | Positive | | |
| CTATTAACAGGCCTATTGATTGG | 680 | 959 | Positive | | |
| TAACAGGCCTATTGATTGGAAAG | 681 | 963 | Positive | | |
| GAAAGTATGTCAACGAATTGTGG | 682 | 981 | Positive | | |
| AAAGTATGTCAACGAATTGTGGG | 683 | 982 | Positive | | |
| TCAACGAATTGTGGGTCTTTTGG | 684 | 990 | Positive | | |
| CAACGAATTGTGGGTCTTTTGGG | 685 | 991 | Positive | | |
| GCTGCCCCATTTACACAATGTGG | 686 | 1018 | Positive | | |
| TGTATGCATGTATTCAATCTAAG | 687 | 1061 | Positive | | |
| ATGCATGTATTCAATCTAAGCAG | 688 | 1064 | Positive | | |
| TGCATGTATTCAATCTAAGCAGG | 689 | 1065 | Positive | | |
| TCACTTTCTCGCCAACTTACAAG | 690 | 1091 | Positive | | |
| CACTTTCTCGCCAACTTACAAGG | 691 | 1092 | Positive | | |
| TGAACCTTTACCCCGTTGCCCGG | 692 | 1136 | Positive | | |
| TTTACCCCGTTGCCCGGCAACGG | 693 | 1142 | Positive | | |
| CCCCGTTGCCCGGCAACGGCCAG | 694 | 1146 | Positive | | |
| CCCGTTGCCCGGCAACGGCCAGG | 695 | 1147 | Positive | | |
| GCAACGGCCAGGTCTGTGCCAAG | 696 | 1158 | Positive | | |
| TTTGCTGACGCAACCCCCACTGG | 697 | 1183 | Positive | | |
| CTGACGCAACCCCCACTGGCTGG | 698 | 1187 | Positive | | |
| TGACGCAACCCCCACTGGCTGGG | 699 | 1188 | Positive | | |
| GACGCAACCCCCACTGGCTGGGG | 700 | 1189 | Positive | | |
| AACCCCCACTGGCTGGGGCTTGG | 701 | 1194 | Positive | | |
| CACTGGCTGGGGCTTGGTCATGG | 702 | 1200 | Positive | | |
| ACTGGCTGGGGCTTGGTCATGGG | 703 | 1201 | Positive | | |
| GGGGCTTGGTCATGGGCCATCAG | 704 | 1208 | Positive | | |
| ATGGGCCATCAGCGCGTGCGTGG | 705 | 1219 | Positive | | |
| GCGCGTGCGTGGAACCTTTTCGG | 706 | 1230 | Positive | | |
| TCCTCTGCCGATCCATACTGCGG | 707 | 1254 | Positive | | |
| GATCCATACTGCGGAACTCCTAG | 708 | 1263 | Positive | | |
| CTAGCCGCTTGTTTTGCTCGCAG | 709 | 1282 | Positive | | |
| GCCGCTTGTTTTGCTCGCAGCAG | 710 | 1285 | Positive | | |
| CCGCTTGTTTTGCTCGCAGCAGG | 711 | 1286 | Positive | | |
| TGTTTTGCTCGCAGCAGGTCTGG | 712 | 1291 | Positive | | |
| TTTTGCTCGCAGCAGGTCTGGAG | 713 | 1293 | Positive | | |
| AGGTCTGGAGCAAACATTATCGG | 714 | 1306 | Positive | | |
| GGTCTGGAGCAAACATTATCGGG | 715 | 1307 | Positive | | |
| GCAAATATACATCGTATCCATGG | 716 | 1355 | Positive | | |
| TACATCGTATCCATGGCTGCTAG | 717 | 1362 | Positive | | |
| ACATCGTATCCATGGCTGCTAGG | 718 | 1363 | Positive | | |
| TGCTAGGCTGTGCTGCCAACTGG | 719 | 1379 | Positive | | |
| GCTGCCAACTGGATCCTGCGCGG | 720 | 1390 | Positive | | |
| CTGCCAACTGGATCCTGCGCGGG | 721 | 1391 | Positive | | |
| GTCCTTTGTTTACGTCCCGTCGG | 722 | 1416 | Positive | | |
| CCCGTCGGCGCTGAATCCTGCGG | 723 | 1431 | Positive | | |
| ATCCTGCGGACGACCCTTCTCGG | 724 | 1445 | Positive | | |
| TCCTGCGGACGACCCTTCTCGGG | 725 | 1446 | Positive | | |
| CCTGCGGACGACCCTTCTCGGGG | 726 | 1447 | Positive | | |
| CGACCCTTCTCGGGGTCGCTTGG | 727 | 1455 | Positive | | |
| GACCCTTCTCGGGGTCGCTTGGG | 728 | 1456 | Positive | | |
| TCTGCCGTTCCGACCGACCACGG | 729 | 1500 | Positive | | |
| CTGCCGTTCCGACCGACCACGGG | 730 | 1501 | Positive | | |
| TGCCGTTCCGACCGACCACGGGG | 731 | 1502 | Positive | | |
| GGGGCGCACCTCTCTTTACGCGG | 732 | 1521 | Positive | | |
| GTCTGTGCCTTCTCATCTGCCGG | 733 | 1551 | Positive | | |
| CTTCACCTCTGCACGTCGCATGG | 734 | 1589 | Positive | | |
| TCACCTCTGCACGTCGCATGGAG | 735 | 1591 | Positive | | |
| ACGCCCACCGAATGTTGCCCAAG | 736 | 1624 | Positive | | |
| CGCCCACCGAATGTTGCCCAAGG | 737 | 1625 | Positive | | |
| TGTTGCCCAAGGTCTTACATAAG | 738 | 1636 | Positive | | |
| TTGCCCAAGGTCTTACATAAGAG | 739 | 1638 | Positive | | |
| TGCCCAAGGTCTTACATAAGAGG | 740 | 1639 | Positive | | |
| GTCTTACATAAGAGGACTCTTGG | 741 | 1647 | Positive | | |
| CAATGTCAACGACCGACCTTGAG | 742 | 1678 | Positive | | |
| AATGTCAACGACCGACCTTGAGG | 743 | 1679 | Positive | | |
| CGACCTTGAGGCATACTTCAAAG | 744 | 1691 | Positive | | |
| CTTCAAAGACTGTTTGTTTAAAG | 745 | 1706 | Positive | | |
| AAGACTGTTTGTTTAAAGACTGG | 746 | 1711 | Positive | | |
| AGACTGTTTGTTTAAAGACTGGG | 747 | 1712 | Positive | | |
| ACTGTTTGTTTAAAGACTGGGAG | 748 | 1714 | Positive | | |
| CTGTTTGTTTAAAGACTGGGAGG | 749 | 1715 | Positive | | |
| GTTTGTTTAAAGACTGGGAGGAG | 750 | 1717 | Positive | | |
| GTTTAAAGACTGGGAGGAGTTGG | 751 | 1721 | Positive | | |
| TTTAAAGACTGGGAGGAGTTGGG | 752 | 1722 | Positive | | |
| TTAAAGACTGGGAGGAGTTGGGG | 753 | 1723 | Positive | | |
| TAAAGACTGGGAGGAGTTGGGGG | 754 | 1724 | Positive | | |
| AAGACTGGGAGGAGTTGGGGGAG | 755 | 1726 | Positive | | |
| AGACTGGGAGGAGTTGGGGGAGG | 756 | 1727 | Positive | | |
| ACTGGGAGGAGTTGGGGGAGGAG | 757 | 1729 | Positive | | |
| GAGGAGTTGGGGGAGGAGATTAG | 758 | 1734 | Positive | | |
| TGGGGGAGGAGATTAGATTAAAG | 759 | 1741 | Positive | | |
| GGGGGAGGAGATTAGATTAAAGG | 760 | 1742 | Positive | | |
| TAGATTAAAGGTCTTTGTACTAG | 761 | 1754 | Positive | | |
| AGATTAAAGGTCTTTGTACTAGG | 762 | 1755 | Positive | | |
| ATTAAAGGTCTTTGTACTAGGAG | 763 | 1757 | Positive | | |
| TTAAAGGTCTTTGTACTAGGAGG | 764 | 1758 | Positive | | |
| GTCTTTGTACTAGGAGGCTGTAG | 765 | 1764 | Positive | | |
| TCTTTGTACTAGGAGGCTGTAGG | 766 | 1765 | Positive | | |
| AGGAGGCTGTAGGCATAAATTGG | 767 | 1775 | Positive | | |
| GCATAAATTGGTCTGCGCACCAG | 768 | 1787 | Positive | | |
| TTGTTCATGTCCTACTGTTCAAG | 769 | 1846 | Positive | Yes | |
| GTCCTACTGTTCAAGCCTCCAAG | 770 | 1854 | Positive | Yes | |
| CAAGCCTCCAAGCTGTGCCTTGG | 771 | 1865 | Positive | Yes | |
| AAGCCTCCAAGCTGTGCCTTGGG | 772 | 1866 | Positive | Yes | |
| CCTCCAAGCTGTGCCTTGGGTGG | 773 | 1869 | Positive | Yes | |
| AGCTGTGCCTTGGGTGGCTTTGG | 774 | 1875 | Positive | Yes | Yes |
| GCTGTGCCTTGGGTGGCTTTGGG | 775 | 1876 | Positive | Yes | Yes |
| CTGTGCCTTGGGTGGCTTTGGGG | 776 | 1877 | Positive | Yes | Yes |
| CCTTGGGTGGCTTTGGGGCATGG | 777 | 1882 | Positive | Yes | Yes |
| CATGGACATCGACCCTTATAAAG | 778 | 1900 | Positive | Yes | Yes |
| ATCGACCCTTATAAAGAATTTGG | 779 | 1907 | Positive | Yes | Yes |
| CGACCCTTATAAAGAATTTGGAG | 780 | 1909 | Positive | Yes | Yes |
| TAAAGAATTTGGAGCTACTGTGG | 781 | 1918 | Positive | Yes | Yes |
| AAGAATTTGGAGCTACTGTGGAG | 782 | 1920 | Positive | Yes | Yes |
| GCCTTCTGACTTCTTTCCTTCAG | 783 | 1957 | Positive | Yes | Yes |
| TGACTTCTTTCCTTCAGTACGAG | 784 | 1963 | Positive | Yes | Yes |
| TCCTTCAGTACGAGATCTTCTAG | 785 | 1972 | Positive | Yes | |
| AGATCTTCTAGATACCGCCTCAG | 786 | 1984 | Positive | Yes | |
| ATACCGCCTCAGCTCTGTATCGG | 787 | 1995 | Positive | Yes | |
| TACCGCCTCAGCTCTGTATCGGG | 788 | 1996 | Positive | Yes | |
| CGCCTCAGCTCTGTATCGGGAAG | 789 | 1999 | Positive | Yes | |
| AGCTCTGTATCGGGAAGCCTTAG | 790 | 2005 | Positive | Yes | |
| CTCTGTATCGGGAAGCCTTAGAG | 791 | 2007 | Positive | Yes | |
| GGGAAGCCTTAGAGTCTCCTGAG | 792 | 2016 | Positive | Yes | |
| TCACCTCACCATACTGCACTCAG | 793 | 2045 | Positive | Yes | |
| CACCTCACCATACTGCACTCAGG | 794 | 2046 | Positive | Yes | |
| TCACCATACTGCACTCAGGCAAG | 795 | 2050 | Positive | Yes | |
| TCAGGCAAGCAATTCTTTGCTGG | 796 | 2064 | Positive | Yes | |
| CAGGCAAGCAATTCTTTGCTGGG | 797 | 2065 | Positive | Yes | |
| AGGCAAGCAATTCTTTGCTGGGG | 798 | 2066 | Positive | Yes | |
| GGCAAGCAATTCTTTGCTGGGGG | 799 | 2067 | Positive | Yes | |
| GCAAGCAATTCTTTGCTGGGGGG | 800 | 2068 | Positive | Yes | |
| CTGGGGGGAACTAATGACTCTAG | 801 | 2083 | Positive | Yes | |
| AACTAATGACTCTAGCTACCTGG | 802 | 2091 | Positive | Yes | |
| ACTAATGACTCTAGCTACCTGGG | 803 | 2092 | Positive | Yes | |
| AATGACTCTAGCTACCTGGGTGG | 804 | 2095 | Positive | Yes | |
| ATGACTCTAGCTACCTGGGTGGG | 805 | 2096 | Positive | Yes | |
| TACCTGGGTGGGTGTTAATTTGG | 806 | 2107 | Positive | Yes | |
| CTGGGTGGGTGTTAATTTGGAAG | 807 | 2110 | Positive | Yes | |
| GGGTGTTAATTTGGAAGATCCAG | 808 | 2116 | Positive | Yes | |
| AATTTGGAAGATCCAGCATCTAG | 809 | 2123 | Positive | Yes | |
| TTTGGAAGATCCAGCATCTAGAG | 810 | 2125 | Positive | Yes | |
| AGATCCAGCATCTAGAGACCTAG | 811 | 2131 | Positive | Yes | |
| TCCAGCATCTAGAGACCTAGTAG | 812 | 2134 | Positive | Yes | |
| GCATCTAGAGACCTAGTAGTCAG | 813 | 2138 | Positive | Yes | |
| CAGTTATGTCAACACTAATATGG | 814 | 2158 | Positive | Yes | |
| AGTTATGTCAACACTAATATGGG | 815 | 2159 | Positive | Yes | |
| TCAACACTAATATGGGCCTAAAG | 816 | 2166 | Positive | Yes | |
| ACTAATATGGGCCTAAAGTTCAG | 817 | 2171 | Positive | Yes | |
| CTAATATGGGCCTAAAGTTCAGG | 818 | 2172 | Positive | Yes | |
| TAAAGTTCAGGCAACTCTTGTGG | 819 | 2184 | Positive | Yes | |
| CACATTTCTTGTCTCACTTTTGG | 820 | 2210 | Positive | Yes | |
| ATTTCTTGTCTCACTTTTGGAAG | 821 | 2213 | Positive | Yes | |
| TTCTTGTCTCACTTTTGGAAGAG | 822 | 2215 | Positive | Yes | |
| TTTTGGAAGAGAAACCGTTATAG | 823 | 2227 | Positive | Yes | |
| TTGGAAGAGAAACCGTTATAGAG | 824 | 2229 | Positive | Yes | |
| AGAAACCGTTATAGAGTATTTGG | 825 | 2236 | Positive | Yes | |
| ATAGAGTATTTGGTGTCTTTCGG | 826 | 2246 | Positive | Yes | |
| AGAGTATTTGGTGTCTTTCGGAG | 827 | 2248 | Positive | Yes | |
| ATTTGGTGTCTTTCGGAGTGTGG | 828 | 2253 | Positive | Yes | |
| AGTGTGGATTCGCACTCCTCCAG | 829 | 2269 | Positive | Yes | |
| ATTCGCACTCCTCCAGCTTATAG | 830 | 2276 | Positive | Yes | |
| CCCTATCCTATCAACACTTCCGG | 831 | 2311 | Positive | Yes | |
| CTTCCGGAAACTACTGTTGTTAG | 832 | 2327 | Positive | Yes | |
| AACTACTGTTGTTAGACGACGAG | 833 | 2335 | Positive | Yes | |
| ACTACTGTTGTTAGACGACGAGG | 834 | 2336 | Positive | Yes | |
| ACTGTTGTTAGACGACGAGGCAG | 835 | 2339 | Positive | Yes | |
| CTGTTGTTAGACGACGAGGCAGG | 836 | 2340 | Positive | Yes | |
| AGACGACGAGGCAGGTCCCCTAG | 837 | 2348 | Positive | Yes | |
| CGACGAGGCAGGTCCCCTAGAAG | 838 | 2351 | Positive | Yes | |
| CGAGGCAGGTCCCCTAGAAGAAG | 839 | 2354 | Positive | Yes | |
| AGAAGAACTCCCTCGCCTCGCAG | 840 | 2372 | Positive | Yes | |
| ACTCCCTCGCCTCGCAGACGAAG | 841 | 2378 | Positive | Yes | |
| CTCCCTCGCCTCGCAGACGAAGG | 842 | 2379 | Positive | Yes | |
| AGGTCTCAATCGCCGCGTCGCAG | 843 | 2399 | Positive | Yes | |
| TCTCAATCGCCGCGTCGCAGAAG | 844 | 2402 | Positive | Yes | |
| GTCGCAGAAGATCTCAATCTCGG | 845 | 2415 | Positive | Yes | |
| TCGCAGAAGATCTCAATCTCGGG | 846 | 2416 | Positive | Yes | |
| AATCTCGGGAACCTCAATGTTAG | 847 | 2430 | Positive | Yes | |
| ACCTCAATGTTAGTATTCCTTGG | 848 | 2440 | Positive | | |
| TTAGTATTCCTTGGACTCATAAG | 849 | 2449 | Positive | | |
| TAGTATTCCTTGGACTCATAAGG | 850 | 2450 | Positive | | |
| TATTCCTTGGACTCATAAGGTGG | 851 | 2453 | Positive | | |
| ATTCCTTGGACTCATAAGGTGGG | 852 | 2454 | Positive | | |
| TTCCTTGGACTCATAAGGTGGGG | 853 | 2455 | Positive | | |
| CATAAGGTGGGGAACTTTACTGG | 854 | 2466 | Positive | | |
| TACCTGTCTTTAATCCTCATTGG | 855 | 2506 | Positive | | |
| TCCTAATATACATTTACACCAAG | 856 | 2543 | Positive | | |
| ACATTATCAAAAAATGTGAACAG | 857 | 2566 | Positive | | |
| CAAAAAATGTGAACAGTTTGTAG | 858 | 2573 | Positive | | |
| AAAAAATGTGAACAGTTTGTAGG | 859 | 2574 | Positive | | |
| ACAGTTTGTAGGCCCACTTACAG | 860 | 2585 | Positive | | |
| TAGGCCCACTTACAGTTAATGAG | 861 | 2593 | Positive | | |
| CCACTTACAGTTAATGAGAAAAG | 862 | 2598 | Positive | | |
| CTTACAGTTAATGAGAAAAGAAG | 863 | 2601 | Positive | | |
| TTGCAATTGATTATGCCTGCTAG | 864 | 2625 | Positive | | |
| TGCAATTGATTATGCCTGCTAGG | 865 | 2626 | Positive | | |
| TGCCTGCTAGGTTTTATCCAAAG | 866 | 2638 | Positive | | |
| GCCTGCTAGGTTTTATCCAAAGG | 867 | 2639 | Positive | | |
| GGTTACCAAATATTTACCATTGG | 868 | 2660 | Positive | | |
| CCAAATATTTACCATTGGATAAG | 869 | 2665 | Positive | | |
| CAAATATTTACCATTGGATAAGG | 870 | 2666 | Positive | | |
| AAATATTTACCATTGGATAAGGG | 871 | 2667 | Positive | | |
| GGGTATTAAACCTTATTATCCAG | 872 | 2687 | Positive | | |
| ACCTTATTATCCAGAACATCTAG | 873 | 2696 | Positive | | |
| GTTAATCATTACTTCCAAACTAG | 874 | 2718 | Positive | | |
| GACACTATTTACACACTCTATGG | 875 | 2740 | Positive | | |
| ACTATTTACACACTCTATGGAAG | 876 | 2743 | Positive | | |
| CTATTTACACACTCTATGGAAGG | 877 | 2744 | Positive | | |
| TTTACACACTCTATGGAAGGCGG | 878 | 2747 | Positive | | |
| TTACACACTCTATGGAAGGCGGG | 879 | 2748 | Positive | | |
| GGAAGGCGGGTATATTATATAAG | 880 | 2761 | Positive | | |
| AAGGCGGGTATATTATATAAGAG | 881 | 2763 | Positive | | |
| GGCGGGTATATTATATAAGAGAG | 882 | 2765 | Positive | | |
| TATAAGAGAGAAACAACACATAG | 883 | 2778 | Positive | | |
| ACACATAGCGCCTCATTTTGTGG | 884 | 2793 | Positive | | |
| CACATAGCGCCTCATTTTGTGGG | 885 | 2794 | Positive | | |
| TTTGTGGGTCACCATATTCTTGG | 886 | 2809 | Positive | | |
| TTGTGGGTCACCATATTCTTGGG | 887 | 2810 | Positive | | |
| GTCACCATATTCTTGGGAACAAG | 888 | 2816 | Positive | | |
| ATTCTTGGGAACAAGATCTACAG | 889 | 2824 | Positive | | |
| TGGGAACAAGATCTACAGCATGG | 890 | 2829 | Positive | | |
| GGGAACAAGATCTACAGCATGGG | 891 | 2830 | Positive | | |
| GGAACAAGATCTACAGCATGGGG | 892 | 2831 | Positive | | |
| ACAAGATCTACAGCATGGGGCAG | 893 | 2834 | Positive | | |
| ATGGGGCAGAATCTTTCCACCAG | 894 | 2848 | Positive | | |
| TCTTTCCACCAGCAATCCTCTGG | 895 | 2859 | Positive | | |
| CTTTCCACCAGCAATCCTCTGGG | 896 | 2860 | Positive | | |
| TGGGATTCTTTCCCGACCACCAG | 897 | 2879 | Positive | | |
| ATTCTTTCCCGACCACCAGTTGG | 898 | 2883 | Positive | | |
| TCCCGACCACCAGTTGGATCCAG | 899 | 2889 | Positive | | |
| CACCAGTTGGATCCAGCCTTCAG | 900 | 2896 | Positive | | |
| CCAGTTGGATCCAGCCTTCAGAG | 901 | 2898 | Positive | | |
| TCCAGCCTTCAGAGCAAACACAG | 902 | 2907 | Positive | | |
| CAGAGCAAACACAGCAAATCCAG | 903 | 2916 | Positive | | |
| CAAACACAGCAAATCCAGATTGG | 904 | 2921 | Positive | | |
| AAACACAGCAAATCCAGATTGGG | 905 | 2922 | Positive | | |
| ATTGGGACTTCAATCCCAACAAG | 906 | 2939 | Positive | | |
| TTGGGACTTCAATCCCAACAAGG | 907 | 2940 | Positive | | |
| TCAATCCCAACAAGGACACCTGG | 908 | 2948 | Positive | | |
| TCCCAACAAGGACACCTGGCCAG | 909 | 2952 | Positive | | |
| ACACCTGGCCAGACGCCAACAAG | 910 | 2963 | Positive | | |
| CACCTGGCCAGACGCCAACAAGG | 911 | 2964 | Positive | | |
| CTGGCCAGACGCCAACAAGGTAG | 912 | 2967 | Positive | | |
| TGGCCAGACGCCAACAAGGTAGG | 913 | 2968 | Positive | | |
| GCCAGACGCCAACAAGGTAGGAG | 914 | 2970 | Positive | | |
| GACGCCAACAAGGTAGGAGCTGG | 915 | 2974 | Positive | | |
| CGCCAACAAGGTAGGAGCTGGAG | 916 | 2976 | Positive | | |
| AAGGTAGGAGCTGGAGCATTCGG | 917 | 2983 | Positive | | |
| AGGTAGGAGCTGGAGCATTCGGG | 918 | 2984 | Positive | | |
| AGGAGCTGGAGCATTCGGGCTGG | 919 | 2988 | Positive | | |
| GGAGCTGGAGCATTCGGGCTGGG | 920 | 2989 | Positive | | |
| CTGGGTTTCACCCCACCGCACGG | 921 | 3007 | Positive | | |
| GGGTTTCACCCCACCGCACGGAG | 922 | 3009 | Positive | | |
| GGTTTCACCCCACCGCACGGAGG | 923 | 3010 | Positive | | |
| CCCACCGCACGGAGGCCTTTTGG | 924 | 3018 | Positive | | |
| CCACCGCACGGAGGCCTTTTGGG | 925 | 3019 | Positive | | |
| CACCGCACGGAGGCCTTTTGGGG | 926 | 3020 | Positive | | |
| CGCACGGAGGCCTTTTGGGGTGG | 927 | 3023 | Positive | | |
| CACGGAGGCCTTTTGGGGTGGAG | 928 | 3025 | Positive | | |
| GCCTTTTGGGGTGGAGCCCTCAG | 929 | 3032 | Positive | | |
| CCTTTTGGGGTGGAGCCCTCAGG | 930 | 3033 | Positive | | |
| TGGGGTGGAGCCCTCAGGCTCAG | 931 | 3038 | Positive | | |
| GGGGTGGAGCCCTCAGGCTCAGG | 932 | 3039 | Positive | | |
| GGGTGGAGCCCTCAGGCTCAGGG | 933 | 3040 | Positive | | |
| GGGCATACTACAAACTTTGCCAG | 934 | 3060 | Positive | | |
| CTCCTGCCTCCACCAATCGCCAG | 935 | 3092 | Positive | | |
| TGCCTCCACCAATCGCCAGACAG | 936 | 3096 | Positive | | |
| GCCTCCACCAATCGCCAGACAGG | 937 | 3097 | Positive | | |
| TCCACCAATCGCCAGACAGGAAG | 938 | 3100 | Positive | | |
| CCACCAATCGCCAGACAGGAAGG | 939 | 3101 | Positive | | |
| CCAATCGCCAGACAGGAAGGCAG | 940 | 3104 | Positive | | |
| ACCCCGCTGTCTCCACCTTTGAG | 941 | 3130 | Positive | | |
| CTTTGAGAAACACTCATCCTCAG | 942 | 3146 | Positive | | |
| TTTGAGAAACACTCATCCTCAGG | 943 | 3147 | Positive | | |
| ACACTCATCCTCAGGCCATGCAG | 944 | 3155 | Positive | | |
| CTCATCCTCAGGCCATGCAGTGG | 945 | 3158 | Positive | | |
| TTGTGGAATTC | 946 | 3173 | Negative | | |
| GAAAGGTTGTGGAATTC | 947 | 3167 | Negative | | |
| TGAAAGGTTGTGGAATTG | 948 | 3166 | Negative | | |
| CCACTGCATGGCCTGAGGATGAG | 949 | −1 | Negative | | |
| CTGAGGATGAGTGTTTCTCAAAG | 950 | 11 | Negative | | |
| TGAGGATGAGTGTTTCTCAAAGG | 951 | 12 | Negative | | |
| GGATGAGTGTTTCTCAAAGGTGG | 952 | 15 | Negative | | |
| ATGAGTGTTTCTCAAAGGTGGAG | 953 | 17 | Negative | | |
| GTGTTTCTCAAAGGTGGAGACAG | 954 | 21 | Negative | | |
| TTTCTCAAAGGTGGAGACAGCGG | 955 | 24 | Negative | | |
| TTCTCAAAGGTGGAGACAGCGGG | 956 | 25 | Negative | | |
| TCTCAAAGGTGGAGACAGCGGGG | 957 | 26 | Negative | | |
| CAAAGGTGGAGACAGCGGGGTAG | 958 | 29 | Negative | | |
| AAAGGTGGAGACAGCGGGGTAGG | 959 | 30 | Negative | | |
| GGGTAGGCTGCCTTCCTGTCTGG | 960 | 46 | Negative | | |
| CTGCCTTCCTGTCTGGCGATTGG | 961 | 53 | Negative | | |
| CCTTCCTGTCTGGCGATTGGTGG | 962 | 56 | Negative | | |
| TTCCTGTCTGGCGATTGGTGGAG | 963 | 58 | Negative | | |
| TCCTGTCTGGCGATTGGTGGAGG | 964 | 59 | Negative | | |
| TGTCTGGCGATTGGTGGAGGCAG | 965 | 62 | Negative | | |
| GTCTGGCGATTGGTGGAGGCAGG | 966 | 63 | Negative | | |
| CTGGCGATTGGTGGAGGCAGGAG | 967 | 65 | Negative | | |
| TGGCGATTGGTGGAGGCAGGAGG | 968 | 66 | Negative | | |
| CGATTGGTGGAGGCAGGAGGCGG | 969 | 69 | Negative | | |
| GAGGCAGGAGGCGGATTTGCTGG | 970 | 78 | Negative | | |
| AGGAGGCGGATTTGCTGGCAAAG | 971 | 83 | Negative | | |
| GGATTTGCTGGCAAAGTTTGTAG | 972 | 90 | Negative | | |
| CAAAGTTTGTAGTATGCCCTGAG | 973 | 101 | Negative | | |
| TTGTAGTATGCCCTGAGCCTGAG | 974 | 107 | Negative | | |
| TGTAGTATGCCCTGAGCCTGAGG | 975 | 108 | Negative | | |
| GTAGTATGCCCTGAGCCTGAGGG | 976 | 109 | Negative | | |
| GCCTGAGGGCTCCACCCCAAAAG | 977 | 123 | Negative | | |
| CCTGAGGGCTCCACCCCAAAAGG | 978 | 124 | Negative | | |
| CACCCCAAAAGGCCTCCGTGCGG | 979 | 135 | Negative | | |
| CCCAAAAGGCCTCCGTGCGGTGG | 980 | 138 | Negative | | |
| CCAAAAGGCCTCCGTGCGGTGGG | 981 | 139 | Negative | | |
| CAAAAGGCCTCCGTGCGGTGGGG | 982 | 140 | Negative | | |
| CCGTGCGGTGGGGTGAAACCCAG | 983 | 150 | Negative | | |
| GAAACCCAGCCCGAATGCTCCAG | 984 | 164 | Negative | | |
| TGCTCCAGCTCCTACCTTGTTGG | 985 | 179 | Negative | | |
| GCTCCTACCTTGTTGGCGTCTGG | 986 | 186 | Negative | | |
| CTACCTTGTTGGCGTCTGGCCAG | 987 | 190 | Negative | | |
| TACCTTGTTGGCGTCTGGCCAGG | 988 | 191 | Negative | | |
| GTCTGGCCAGGTGTCCTTGTTGG | 989 | 203 | Negative | | |
| TCTGGCCAGGTGTCCTTGTTGGG | 990 | 204 | Negative | | |
| AGGTGTCCTTGTTGGGATTGAAG | 991 | 211 | Negative | | |
| TTGGGATTGAAGTCCCAATCTGG | 992 | 222 | Negative | | |
| GATTTGCTGTGTTTGCTCTGAAG | 993 | 244 | Negative | | |
| ATTTGCTGTGTTTGCTCTGAAGG | 994 | 245 | Negative | | |
| GCTGTGTTTGCTCTGAAGGCTGG | 995 | 249 | Negative | | |
| CTCTGAAGGCTGGATCCAACTGG | 996 | 259 | Negative | | |
| TGAAGGCTGGATCCAACTGGTGG | 997 | 262 | Negative | | |
| GGCTGGATCCAACTGGTGGTCGG | 998 | 266 | Negative | | |
| GCTGGATCCAACTGGTGGTCGGG | 999 | 267 | Negative | | |
| GATCCAACTGGTGGTCGGGAAAG | 1000 | 271 | Negative | | |
| TGGTGGTCGGGAAAGAATCCCAG | 1001 | 279 | Negative | | |
| GTGGTCGGGAAAGAATCCCAGAG | 1002 | 281 | Negative | | |
| TGGTCGGGAAAGAATCCCAGAGG | 1003 | 282 | Negative | | |
| AAAGAATCCCAGAGGATTGCTGG | 1004 | 290 | Negative | | |
| GAATCCCAGAGGATTGCTGGTGG | 1005 | 293 | Negative | | |
| CCCAGAGGATTGCTGGTGGAAAG | 1006 | 297 | Negative | | |
| AAAGATTCTGCCCCATGCTGTAG | 1007 | 316 | Negative | | |
| ATGCTGTAGATCTTGTTCCCAAG | 1008 | 330 | Negative | | |
| AGATCTTGTTCCCAAGAATATGG | 1009 | 337 | Negative | | |
| AATATGGTGACCCACAAAATGAG | 1010 | 353 | Negative | | |
| ATATGGTGACCCACAAAATGAGG | 1011 | 354 | Negative | | |
| TATAATATACCCGCCTTCCATAG | 1012 | 400 | Negative | | |
| TAATATACCCGCCTTCCATAGAG | 1013 | 402 | Negative | | |
| CCTTCCATAGAGTGTGTAAATAG | 1014 | 413 | Negative | | |
| TAGAGTGTGTAAATAGTGTCTAG | 1015 | 420 | Negative | | |
| TGTGTAAATAGTGTCTAGTTTGG | 1016 | 425 | Negative | | |
| GTAAATAGTGTCTAGTTTGGAAG | 1017 | 428 | Negative | | |
| GTTTGGAAGTAATGATTAACTAG | 1018 | 442 | Negative | | |
| TAATGATTAACTAGATGTTCTGG | 1019 | 451 | Negative | | |
| AACTAGATGTTCTGGATAATAAG | 1020 | 459 | Negative | | |
| ACTAGATGTTCTGGATAATAAGG | 1021 | 460 | Negative | | |
| GGTTTAATACCCTTATCCAATGG | 1022 | 481 | Negative | | |
| CTTATCCAATGGTAAATATTTGG | 1023 | 492 | Negative | | |
| GGTAAATATTTGGTAACCTTTGG | 1024 | 502 | Negative | | |
| GGTAACCTTTGGATAAAACCTAG | 1025 | 513 | Negative | | |
| AACCTTTGGATAAAACCTAGCAG | 1026 | 516 | Negative | | |
| ACCTTTGGATAAAACCTAGCAGG | 1027 | 517 | Negative | | |
| CTTCTTTTCTCATTAACTGTAAG | 1028 | 556 | Negative | | |
| CTTTTCTCATTAACTGTAAGTGG | 1029 | 559 | Negative | | |
| TTTTCTCATTAACTGTAAGTGGG | 1030 | 560 | Negative | | |
| CACATTTTTTGATAATGTCTTGG | 1031 | 596 | Negative | | |
| GTCTTGGTGTAAATGTATATTAG | 1032 | 612 | Negative | | |
| TCTTGGTGTAAATGTATATTAGG | 1033 | 613 | Negative | | |
| GTGTAAATGTATATTAGGAAAAG | 1034 | 618 | Negative | | |
| AAATGTATATTAGGAAAAGATGG | 1035 | 622 | Negative | | |
| AAAAGATGGTGTTTTCCAATGAG | 1036 | 636 | Negative | | |
| AAAGATGGTGTTTTCCAATGAGG | 1037 | 637 | Negative | | |
| GTGTTTTCCAATGAGGATTAAAG | 1038 | 644 | Negative | | |
| TTTCCAATGAGGATTAAAGACAG | 1039 | 648 | Negative | | |
| TTCCAATGAGGATTAAAGACAGG | 1040 | 649 | Negative | | |
| ATGAGGATTAAAGACAGGTACAG | 1041 | 654 | Negative | | |
| AGGATTAAAGACAGGTACAGTAG | 1042 | 657 | Negative | | |
| ATTAAAGACAGGTACAGTAGAAG | 1043 | 660 | Negative | | |
| ACAGGTACAGTAGAAGAATAAAG | 1044 | 667 | Negative | | |
| TACAGTAGAAGAATAAAGACCAG | 1045 | 672 | Negative | | |
| TAGAAGAATAAAGACCAGTAAAG | 1046 | 677 | Negative | | |
| AGTAAAGTTCCCCACCTTATGAG | 1047 | 693 | Negative | | |
| GTTCCCCACCTTATGAGTCCAAG | 1048 | 699 | Negative | | |
| TTCCCCACCTTATGAGTCCAAGG | 1049 | 700 | Negative | | |
| GTCCAAGGAATACTAACATTGAG | 1050 | 715 | Negative | | |
| TCCAAGGAATACTAACATTGAGG | 1051 | 716 | Negative | | |
| ATACTAACATTGAGGTTCCCGAG | 1052 | 724 | Negative | | |
| ACATTGAGGTTCCCGAGATTGAG | 1053 | 730 | Negative | Yes | |
| GATTGAGATCTTCTGCGACGCGG | 1054 | 746 | Negative | Yes | |
| TCTTCTGCGACGCGGCGATTGAG | 1055 | 754 | Negative | Yes | |
| CGATTGAGACCTTCGTCTGCGAG | 1056 | 769 | Negative | Yes | |
| GATTGAGACCTTCGTCTGCGAGG | 1057 | 770 | Negative | Yes | |
| GAGACCTTCGTCTGCGAGGCGAG | 1058 | 774 | Negative | Yes | |
| AGACCTTCGTCTGCGAGGCGAGG | 1059 | 775 | Negative | Yes | |
| GACCTTCGTCTGCGAGGCGAGGG | 1060 | 776 | Negative | Yes | |
| CCTTCGTCTGCGAGGCGAGGGAG | 1061 | 778 | Negative | Yes | |
| AGGCGAGGGAGTTCTTCTTCTAG | 1062 | 790 | Negative | Yes | |
| GGCGAGGGAGTTCTTCTTCTAGG | 1063 | 791 | Negative | Yes | |
| GCGAGGGAGTTCTTCTTCTAGGG | 1064 | 792 | Negative | Yes | |
| CGAGGGAGTTCTTCTTCTAGGGG | 1065 | 793 | Negative | Yes | |
| CCTGCCTCGTCGTCTAACAACAG | 1066 | 817 | Negative | Yes | |
| GCCTCGTCGTCTAACAACAGTAG | 1067 | 820 | Negative | Yes | |
| CGTCTAACAACAGTAGTTTCCGG | 1068 | 827 | Negative | Yes | |
| CTAACAACAGTAGTTTCCGGAAG | 1069 | 830 | Negative | Yes | |
| GTAGTTTCCGGAAGTGTTGATAG | 1070 | 839 | Negative | Yes | |
| TAGTTTCCGGAAGTGTTGATAGG | 1071 | 840 | Negative | Yes | |
| TTCCGGAAGTGTTGATAGGATAG | 1072 | 844 | Negative | Yes | |
| TCCGGAAGTGTTGATAGGATAGG | 1073 | 845 | Negative | Yes | |
| CCGGAAGTGTTGATAGGATAGGG | 1074 | 846 | Negative | Yes | |
| CGGAAGTGTTGATAGGATAGGGG | 1075 | 847 | Negative | Yes | |
| GTTGATAGGATAGGGGCATTTGG | 1076 | 854 | Negative | Yes | |
| GATAGGATAGGGGCATTTGGTGG | 1077 | 857 | Negative | Yes | |
| AGGGGCATTTGGTGGTCTATAAG | 1078 | 865 | Negative | Yes | |
| GCATTTGGTGGTCTATAAGCTGG | 1079 | 869 | Negative | Yes | |
| ATTTGGTGGTCTATAAGCTGGAG | 1080 | 871 | Negative | Yes | |
| TTTGGTGGTCTATAAGCTGGAGG | 1081 | 872 | Negative | Yes | |
| TGGTGGTCTATAAGCTGGAGGAG | 1082 | 874 | Negative | Yes | |
| AGTGCGAATCCACACTCCGAAAG | 1083 | 895 | Negative | Yes | |
| AGACACCAAATACTCTATAACGG | 1084 | 916 | Negative | Yes | |
| TATAACGGTTTCTCTTCCAAAAG | 1085 | 931 | Negative | Yes | |
| ACGGTTTCTCTTCCAAAAGTGAG | 1086 | 935 | Negative | Yes | |
| TTCTCTTCCAAAAGTGAGACAAG | 1087 | 940 | Negative | Yes | |
| GACAAGAAATGTGAAACCACAAG | 1088 | 957 | Negative | Yes | |
| CAAGAAATGTGAAACCACAAGAG | 1089 | 959 | Negative | Yes | |
| CACAAGAGTTGCCTGAACTTTAG | 1090 | 974 | Negative | Yes | |
| ACAAGAGTTGCCTGAACTTTAGG | 1091 | 975 | Negative | Yes | |
| CCTGAACTTTAGGCCCATATTAG | 1092 | 985 | Negative | Yes | |
| GTGTTGACATAACTGACTACTAG | 1093 | 1007 | Negative | Yes | |
| TGTTGACATAACTGACTACTAGG | 1094 | 1008 | Negative | Yes | |
| ATAACTGACTACTAGGTCTCTAG | 1095 | 1015 | Negative | Yes | |
| ACTACTAGGTCTCTAGATGCTGG | 1096 | 1022 | Negative | Yes | |
| CTTCCAAATTAACACCCACCCAG | 1097 | 1047 | Negative | Yes | |
| TTCCAAATTAACACCCACCCAGG | 1098 | 1048 | Negative | Yes | |
| CAAATTAACACCCACCCAGGTAG | 1099 | 1051 | Negative | Yes | |
| TTAACACCCACCCAGGTAGCTAG | 1100 | 1055 | Negative | Yes | |
| AACACCCACCCAGGTAGCTAGAG | 1101 | 1057 | Negative | Yes | |
| ACCCAGGTAGCTAGAGTCATTAG | 1102 | 1064 | Negative | Yes | |
| CTAGAGTCATTAGTTCCCCCCAG | 1103 | 1074 | Negative | Yes | |
| GTCATTAGTTCCCCCCAGCAAAG | 1104 | 1079 | Negative | Yes | |
| CAGCAAAGAATTGCTTGCCTGAG | 1105 | 1094 | Negative | Yes | |
| AAGAATTGCTTGCCTGAGTGCAG | 1106 | 1099 | Negative | Yes | |
| TTGCTTGCCTGAGTGCAGTATGG | 1107 | 1104 | Negative | Yes | |
| TTGCCTGAGTGCAGTATGGTGAG | 1108 | 1108 | Negative | Yes | |
| TGCCTGAGTGCAGTATGGTGAGG | 1109 | 1109 | Negative | Yes | |
| ATGGTGAGGTGAACAATGCTCAG | 1110 | 1123 | Negative | Yes | |
| TGGTGAGGTGAACAATGCTCAGG | 1111 | 1124 | Negative | Yes | |
| GTGAGGTGAACAATGCTCAGGAG | 1112 | 1126 | Negative | Yes | |
| AACAATGCTCAGGAGACTCTAAG | 1113 | 1134 | Negative | Yes | |
| ACAATGCTCAGGAGACTCTAAGG | 1114 | 1135 | Negative | Yes | |
| GACTCTAAGGCTTCCCGATACAG | 1115 | 1148 | Negative | Yes | |
| CTCTAAGGCTTCCCGATACAGAG | 1116 | 1150 | Negative | Yes | |
| AGGCTTCCCGATACAGAGCTGAG | 1117 | 1155 | Negative | Yes | |
| GGCTTCCCGATACAGAGCTGAGG | 1118 | 1156 | Negative | Yes | |
| TTCCCGATACAGAGCTGAGGCGG | 1119 | 1159 | Negative | Yes | |
| TACAGAGCTGAGGCGGTATCTAG | 1120 | 1166 | Negative | Yes | |
| AGAGCTGAGGCGGTATCTAGAAG | 1121 | 1169 | Negative | Yes | |
| ATCTAGAAGATCTCGTACTGAAG | 1122 | 1183 | Negative | Yes | |
| TCTAGAAGATCTCGTACTGAAGG | 1123 | 1184 | Negative | Yes | |
| GAAGATCTCGTACTGAAGGAAAG | 1124 | 1188 | Negative | Yes | |
| GATCTCGTACTGAAGGAAAGAAG | 1125 | 1191 | Negative | Yes | |
| TCGTACTGAAGGAAAGAAGTCAG | 1126 | 1195 | Negative | Yes | |
| TACTGAAGGAAAGAAGTCAGAAG | 1127 | 1198 | Negative | Yes | |
| ACTGAAGGAAAGAAGTCAGAAGG | 1128 | 1199 | Negative | Yes | |
| AGAAGTCAGAAGGCAAAAACGAG | 1129 | 1209 | Negative | Yes | |
| AAGTCAGAAGGCAAAAACGAGAG | 1130 | 1211 | Negative | Yes | |
| CAAAAACGAGAGTAACTCCACAG | 1131 | 1222 | Negative | Yes | Yes |
| AAACGAGAGTAACTCCACAGTAG | 1132 | 1225 | Negative | Yes | Yes |
| AGTAGCTCCAAATTCTTTATAAG | 1133 | 1243 | Negative | Yes | Yes |
| GTAGCTCCAAATTCTTTATAAGG | 1134 | 1244 | Negative | Yes | Yes |
| TAGCTCCAAATTCTTTATAAGGG | 1135 | 1245 | Negative | Yes | Yes |
| GGGTCGATGTCCATGCCCCAAAG | 1136 | 1265 | Negative | Yes | Yes |
| TCCATGCCCCAAAGCCACCCAAG | 1137 | 1274 | Negative | Yes | Yes |
| CCATGCCCCAAAGCCACCCAAGG | 1138 | 1275 | Negative | Yes | Yes |
| CCCCAAAGCCACCCAAGGCACAG | 1139 | 1280 | Negative | Yes | Yes |
| AAGCCACCCAAGGCACAGCTTGG | 1140 | 1285 | Negative | Yes | Yes |
| GCCACCCAAGGCACAGCTTGGAG | 1141 | 1287 | Negative | Yes | Yes |
| CCACCCAAGGCACAGCTTGGAGG | 1142 | 1288 | Negative | Yes | Yes |
| GCACAGCTTGGAGGCTTGAACAG | 1143 | 1297 | Negative | Yes | Yes |
| CAGCTTGGAGGCTTGAACAGTAG | 1144 | 1300 | Negative | Yes | Yes |
| AGCTTGGAGGCTTGAACAGTAGG | 1145 | 1301 | Negative | Yes | Yes |
| TTGAACAGTAGGACATGAACAAG | 1146 | 1312 | Negative | Yes | Yes |
| GAACAGTAGGACATGAACAAGAG | 1147 | 1314 | Negative | Yes | |
| GGACATGAACAAGAGATGATTAG | 1148 | 1322 | Negative | Yes | |
| GACATGAACAAGAGATGATTAGG | 1149 | 1323 | Negative | Yes | |
| ATGAACAAGAGATGATTAGGCAG | 1150 | 1326 | Negative | Yes | |
| GAACAAGAGATGATTAGGCAGAG | 1151 | 1328 | Negative | Yes | |
| AACAAGAGATGATTAGGCAGAGG | 1152 | 1329 | Negative | Yes | |
| ATGATTAGGCAGAGGTGAAAAAG | 1153 | 1337 | Negative | Yes | |
| GCAGAGGTGAAAAAGTTGCATGG | 1154 | 1345 | Negative | | |
| GTGAAAAAGTTGCATGGTGCTGG | 1155 | 1351 | Negative | | |
| AGTTGCATGGTGCTGGTGCGCAG | 1156 | 1358 | Negative | | |
| CGCAGACCAATTTATGCCTACAG | 1157 | 1376 | Negative | | |
| AATTTATGCCTACAGCCTCCTAG | 1158 | 1384 | Negative | | |
| GCCTACAGCCTCCTAGTACAAAG | 1159 | 1391 | Negative | | |
| TCTCCTCCCCCAACTCCTCCCAG | 1160 | 1427 | Negative | | |
| CCTCCCAGTCTTTAAACAAACAG | 1161 | 1442 | Negative | | |
| CTTTAAACAAACAGTCTTTGAAG | 1162 | 1451 | Negative | | |
| CAGTCTTTGAAGTATGCCTCAAG | 1163 | 1462 | Negative | | |
| AGTCTTTGAAGTATGCCTCAAGG | 1164 | 1463 | Negative | | |
| TTTGAAGTATGCCTCAAGGTCGG | 1165 | 1467 | Negative | | |
| AAGGTCGGTCGTTGACATTGCAG | 1166 | 1482 | Negative | | |
| GGTCGGTCGTTGACATTGCAGAG | 1167 | 1484 | Negative | | |
| TCGGTCGTTGACATTGCAGAGAG | 1168 | 1486 | Negative | | |
| GTTGACATTGCAGAGAGTCCAAG | 1169 | 1492 | Negative | | |
| TGACATTGCAGAGAGTCCAAGAG | 1170 | 1494 | Negative | | |
| GTCCAAGAGTCCTCTTATGTAAG | 1171 | 1508 | Negative | | |
| AGTCCTCTTATGTAAGACCTTGG | 1172 | 1515 | Negative | | |
| GTCCTCTTATGTAAGACCTTGGG | 1173 | 1516 | Negative | | |
| GTAAGACCTTGGGCAACATTCGG | 1174 | 1526 | Negative | | |
| AGACCTTGGGCAACATTCGGTGG | 1175 | 1529 | Negative | | |
| GACCTTGGGCAACATTCGGTGGG | 1176 | 1530 | Negative | | |
| CAACATTCGGTGGGCGTTCACGG | 1177 | 1539 | Negative | | |
| CATTCGGTGGGCGTTCACGGTGG | 1178 | 1542 | Negative | | |
| GGTGGTCTCCATGCGACGTGCAG | 1179 | 1560 | Negative | | |
| TGGTCTCCATGCGACGTGCAGAG | 1180 | 1562 | Negative | | |
| GGTCTCCATGCGACGTGCAGAGG | 1181 | 1563 | Negative | | |
| CCATGCGACGTGCAGAGGTGAAG | 1182 | 1568 | Negative | | |
| CGACGTGCAGAGGTGAAGCGAAG | 1183 | 1573 | Negative | | |
| GAGGTGAAGCGAAGTGCACACGG | 1184 | 1582 | Negative | | |
| GAAGCGAAGTGCACACGGTCCGG | 1185 | 1587 | Negative | | |
| GCGAAGTGCACACGGTCCGGCAG | 1186 | 1590 | Negative | | |
| GTGCACACGGTCCGGCAGATGAG | 1187 | 1595 | Negative | | |
| CACACGGTCCGGCAGATGAGAAG | 1188 | 1598 | Negative | | |
| ACACGGTCCGGCAGATGAGAAGG | 1189 | 1599 | Negative | | |
| GTCCGGCAGATGAGAAGGCACAG | 1190 | 1604 | Negative | | |
| GGCAGATGAGAAGGCACAGACGG | 1191 | 1608 | Negative | | |
| GCAGATGAGAAGGCACAGACGGG | 1192 | 1609 | Negative | | |
| CAGATGAGAAGGCACAGACGGGG | 1193 | 1610 | Negative | | |
| GATGAGAAGGCACAGACGGGGAG | 1194 | 1612 | Negative | | |
| ACAGACGGGGAGTCCGCGTAAAG | 1195 | 1623 | Negative | | |
| AGACGGGGAGTCCGCGTAAAGAG | 1196 | 1625 | Negative | | |
| ACGGGGAGTCCGCGTAAAGAGAG | 1197 | 1627 | Negative | | |
| CGGGGAGTCCGCGTAAAGAGAGG | 1198 | 1628 | Negative | | |
| GTAAAGAGAGGTGCGCCCCGTGG | 1199 | 1640 | Negative | | |
| AGAGAGGTGCGCCCCGTGGTCGG | 1200 | 1644 | Negative | | |
| AGGTGCGCCCCGTGGTCGGTCGG | 1201 | 1648 | Negative | | |
| CGCCCCGTGGTCGGTCGGAACGG | 1202 | 1653 | Negative | | |
| CCCGTGGTCGGTCGGAACGGCAG | 1203 | 1656 | Negative | | |
| TGGTCGGTCGGAACGGCAGACGG | 1204 | 1660 | Negative | | |
| GTCGGTCGGAACGGCAGACGGAG | 1205 | 1662 | Negative | | |
| GGTCGGAACGGCAGACGGAGAAG | 1206 | 1665 | Negative | | |
| GTCGGAACGGCAGACGGAGAAGG | 1207 | 1666 | Negative | | |
| TCGGAACGGCAGACGGAGAAGGG | 1208 | 1667 | Negative | | |
| CGGAACGGCAGACGGAGAAGGGG | 1209 | 1668 | Negative | | |
| CGGCAGACGGAGAAGGGGACGAG | 1210 | 1673 | Negative | | |
| GCAGACGGAGAAGGGGACGAGAG | 1211 | 1675 | Negative | | |
| AGACGGAGAAGGGGACGAGAGAG | 1212 | 1677 | Negative | | |
| GAAGGGGACGAGAGAGTCCCAAG | 1213 | 1684 | Negative | | |
| AGAGAGTCCCAAGCGACCCCGAG | 1214 | 1694 | Negative | | |
| GAGTCCCAAGCGACCCCGAGAAG | 1215 | 1697 | Negative | | |
| AGTCCCAAGCGACCCCGAGAAGG | 1216 | 1698 | Negative | | |
| GTCCCAAGCGACCCCGAGAAGGG | 1217 | 1699 | Negative | | |
| ACCCCGAGAAGGGTCGTCCGCAG | 1218 | 1709 | Negative | | |
| CCCCGAGAAGGGTCGTCCGCAGG | 1219 | 1710 | Negative | | |
| GAAGGGTCGTCCGCAGGATTCAG | 1220 | 1716 | Negative | | |
| TCCGCAGGATTCAGCGCCGACGG | 1221 | 1725 | Negative | | |
| CCGCAGGATTCAGCGCCGACGGG | 1222 | 1726 | Negative | | |
| GCGCCGACGGGACGTAAACAAAG | 1223 | 1738 | Negative | | |
| CGCCGACGGGACGTAAACAAAGG | 1224 | 1739 | Negative | | |
| TAAACAAAGGACGTCCCGCGCAG | 1225 | 1752 | Negative | | |
| AAACAAAGGACGTCCCGCGCAGG | 1226 | 1753 | Negative | | |
| AGGACGTCCCGCGCAGGATCCAG | 1227 | 1759 | Negative | | |
| CGTCCCGCGCAGGATCCAGTTGG | 1228 | 1763 | Negative | | |
| CCCGCGCAGGATCCAGTTGGCAG | 1229 | 1766 | Negative | | |
| GCAGGATCCAGTTGGCAGCACAG | 1230 | 1771 | Negative | | |
| ATCCAGTTGGCAGCACAGCCTAG | 1231 | 1776 | Negative | | |
| CAGTTGGCAGCACAGCCTAGCAG | 1232 | 1779 | Negative | | |
| GCAGCACAGCCTAGCAGCCATGG | 1233 | 1785 | Negative | | |
| ATGGATACGATGTATATTTGCGG | 1234 | 1804 | Negative | | |
| TGGATACGATGTATATTTGCGGG | 1235 | 1805 | Negative | | |
| GATACGATGTATATTTGCGGGAG | 1236 | 1807 | Negative | | |
| TACGATGTATATTTGCGGGAGAG | 1237 | 1809 | Negative | | |
| ACGATGTATATTTGCGGGAGAGG | 1238 | 1810 | Negative | | |
| ATATTTGCGGGAGAGGACAACAG | 1239 | 1817 | Negative | | |
| ATTTGCGGGAGAGGACAACAGAG | 1240 | 1819 | Negative | | |
| GGAGAGGACAACAGAGTTATCAG | 1241 | 1826 | Negative | | |
| AGTCCCGATAATGTTTGCTCCAG | 1242 | 1847 | Negative | | |
| GTTTGCTCCAGACCTGCTGCGAG | 1243 | 1859 | Negative | | |
| AGACCTGCTGCGAGCAAAACAAG | 1244 | 1868 | Negative | | |
| CCTGCTGCGAGCAAAACAAGCGG | 1245 | 1871 | Negative | | |
| CTGCGAGCAAAACAAGCGGCTAG | 1246 | 1875 | Negative | | |
| TGCGAGCAAAACAAGCGGCTAGG | 1247 | 1876 | Negative | | |
| CGAGCAAAACAAGCGGCTAGGAG | 1248 | 1878 | Negative | | |
| ACAAGCGGCTAGGAGTTCCGCAG | 1249 | 1886 | Negative | | |
| CGGCTAGGAGTTCCGCAGTATGG | 1250 | 1891 | Negative | | |
| AGGAGTTCCGCAGTATGGATCGG | 1251 | 1896 | Negative | | |
| AGTTCCGCAGTATGGATCGGCAG | 1252 | 1899 | Negative | | |
| TTCCGCAGTATGGATCGGCAGAG | 1253 | 1901 | Negative | | |
| TCCGCAGTATGGATCGGCAGAGG | 1254 | 1902 | Negative | | |
| CGCAGTATGGATCGGCAGAGGAG | 1255 | 1904 | Negative | | |
| GGATCGGCAGAGGAGCCGAAAAG | 1256 | 1912 | Negative | | |
| GATCGGCAGAGGAGCCGAAAAGG | 1257 | 1913 | Negative | | |
| AGGTTCCACGCACGCGCTGATGG | 1258 | 1933 | Negative | | |
| CGCGCTGATGGCCCATGACCAAG | 1259 | 1945 | Negative | | |
| GATGGCCCATGACCAAGCCCCAG | 1260 | 1951 | Negative | | |
| GCCCATGACCAAGCCCCAGCCAG | 1261 | 1955 | Negative | | |
| CATGACCAAGCCCCAGCCAGTGG | 1262 | 1958 | Negative | | |
| ATGACCAAGCCCCAGCCAGTGGG | 1263 | 1959 | Negative | | |
| TGACCAAGCCCCAGCCAGTGGGG | 1264 | 1960 | Negative | | |
| GACCAAGCCCCAGCCAGTGGGGG | 1265 | 1961 | Negative | | |
| CCAGCCAGTGGGGGTTGCGTCAG | 1266 | 1970 | Negative | | |
| GGGTTGCGTCAGCAAACACTTGG | 1267 | 1981 | Negative | | |
| GCGTCAGCAAACACTTGGCACAG | 1268 | 1986 | Negative | | |
| GCAAACACTTGGCACAGACCTGG | 1269 | 1992 | Negative | | |
| GGCACAGACCTGGCCGTTGCCGG | 1270 | 2002 | Negative | | |
| GCACAGACCTGGCCGTTGCCGGG | 1271 | 2003 | Negative | | |
| ACCTGGCCGTTGCCGGGCAACGG | 1272 | 2009 | Negative | | |
| CCTGGCCGTTGCCGGGCAACGGG | 1273 | 2010 | Negative | | |
| CTGGCCGTTGCCGGGCAACGGGG | 1274 | 2011 | Negative | | |
| CGTTGCCGGGCAACGGGGTAAAG | 1275 | 2016 | Negative | | |
| GTTGCCGGGCAACGGGGTAAAGG | 1276 | 2017 | Negative | | |
| CGGGCAACGGGGTAAAGGTTCAG | 1277 | 2022 | Negative | | |
| GGGCAACGGGGTAAAGGTTCAGG | 1278 | 2023 | Negative | | |
| AGGTTCAGGTATTGTTTACACAG | 1279 | 2037 | Negative | | |
| TCAGGTATTGTTTACACAGAAAG | 1280 | 2041 | Negative | | |
| CAGGTATTGTTTACACAGAAAGG | 1281 | 2042 | Negative | | |
| TTTACACAGAAAGGCCTTGTAAG | 1282 | 2051 | Negative | | |
| CACAGAAAGGCCTTGTAAGTTGG | 1283 | 2055 | Negative | | |
| GAAAGGCCTTGTAAGTTGGCGAG | 1284 | 2059 | Negative | | |
| GGCCTTGTAAGTTGGCGAGAAAG | 1285 | 2063 | Negative | | |
| GTAAGTTGGCGAGAAAGTGAAAG | 1286 | 2069 | Negative | | |
| CGAGAAAGTGAAAGCCTGCTTAG | 1287 | 2078 | Negative | | |
| TAGATTGAATACATGCATACAAG | 1288 | 2098 | Negative | | |
| AGATTGAATACATGCATACAAGG | 1289 | 2099 | Negative | | |
| GATTGAATACATGCATACAAGGG | 1290 | 2100 | Negative | | |
| TGCATACAAGGGCATTAACGCAG | 1291 | 2111 | Negative | | |
| GCATACAAGGGCATTAACGCAGG | 1292 | 2112 | Negative | | |
| GGATAACCACATTGTGTAAATGG | 1293 | 2133 | Negative | | |
| GATAACCACATTGTGTAAATGGG | 1294 | 2134 | Negative | | |
| ATAACCACATTGTGTAAATGGGG | 1295 | 2135 | Negative | | |
| ACCACATTGTGTAAATGGGGCAG | 1296 | 2138 | Negative | | |
| AATGGGGCAGCAAAACCCAAAAG | 1297 | 2151 | Negative | | |
| TTGACATACTTTCCAATCAATAG | 1298 | 2186 | Negative | | |
| TGACATACTTTCCAATCAATAGG | 1299 | 2187 | Negative | | |
| CCAATCAATAGGCCTGTTAATAG | 1300 | 2198 | Negative | | |
| CAATCAATAGGCCTGTTAATAGG | 1301 | 2199 | Negative | | |
| TCAATAGGCCTGTTAATAGGAAG | 1302 | 2202 | Negative | | |
| TTTTGTATGATGTGTTCTTGTGG | 1303 | 2247 | Negative | | |
| GTATGATGTGTTCTTGTGGCAAG | 1304 | 2251 | Negative | | |
| TATGATGTGTTCTTGTGGCAAGG | 1305 | 2252 | Negative | | |
| ATGACATAACCCATAAAATTCAG | 1306 | 2289 | Negative | | |
| GACATAACCCATAAAATTCAGAG | 1307 | 2291 | Negative | | |
| CATAACCCATAAAATTCAGAGAG | 1308 | 2293 | Negative | | |
| ACCCCATCTCTTTGTTTTGTTAG | 1309 | 2318 | Negative | | |
| CCCCATCTCTTTGTTTTGTTAGG | 1310 | 2319 | Negative | | |
| CCCATCTCTTTGTTTTGTTAGGG | 1311 | 2320 | Negative | | |
| AGGGTTTAAATGTATACCCAAAG | 1312 | 2339 | Negative | | |
| AAATGTATACCCAAAGACAAAAG | 1313 | 2346 | Negative | | |
| ACCCAAAGACAAAAGAAAATTGG | 1314 | 2354 | Negative | | |
| AGACAAAAGAAAATTGGTAACAG | 1315 | 2360 | Negative | | |
| CAAAAGAAAATTGGTAACAGCGG | 1316 | 2363 | Negative | | |
| AAATTGGTAACAGCGGTAAAAAG | 1317 | 2370 | Negative | | |
| AATTGGTAACAGCGGTAAAAAGG | 1318 | 2371 | Negative | | |
| ATTGGTAACAGCGGTAAAAAGGG | 1319 | 2372 | Negative | | |
| ACAGCGGTAAAAAGGGACTCAAG | 1320 | 2379 | Negative | | |
| AAGGGACTCAAGATGCTGTACAG | 1321 | 2390 | Negative | | |
| CTCAAGATGCTGTACAGACTTGG | 1322 | 2396 | Negative | | |
| CACATCATCCATATAACTGAAAG | 1323 | 2429 | Negative | | |
| CCATATAACTGAAAGCCAAACAG | 1324 | 2437 | Negative | | |
| TATAACTGAAAGCCAAACAGTGG | 1325 | 2440 | Negative | | |
| ATAACTGAAAGCCAAACAGTGGG | 1326 | 2441 | Negative | | |
| TAACTGAAAGCCAAACAGTGGGG | 1327 | 2442 | Negative | | |
| AACTGAAAGCCAAACAGTGGGGG | 1328 | 2443 | Negative | | |
| GAAAGCCAAACAGTGGGGGAAAG | 1329 | 2447 | Negative | | |
| CCTACGAACCACTGAACAAATGG | 1330 | 2471 | Negative | | |
| AACCACTGAACAAATGGCACTAG | 1331 | 2477 | Negative | | |
| ACAAATGGCACTAGTAAACTGAG | 1332 | 2486 | Negative | | |
| ATGGCACTAGTAAACTGAGCCAG | 1333 | 2490 | Negative | | |
| TGGCACTAGTAAACTGAGCCAGG | 1334 | 2491 | Negative | | |
| GCACTAGTAAACTGAGCCAGGAG | 1335 | 2493 | Negative | | |
| GTAAACTGAGCCAGGAGAAACGG | 1336 | 2499 | Negative | | |
| TAAACTGAGCCAGGAGAAACGGG | 1337 | 2500 | Negative | | |
| TGAGCCAGGAGAAACGGGCTGAG | 1338 | 2505 | Negative | | |
| GAGCCAGGAGAAACGGGCTGAGG | 1339 | 2506 | Negative | | |
| CGGGCTGAGGCCCACTCCCATAG | 1340 | 2519 | Negative | | |
| GGGCTGAGGCCCACTCCCATAGG | 1341 | 2520 | Negative | | |
| CTCCCATAGGAATTTTCCGAAAG | 1342 | 2533 | Negative | | |
| ATAGGAATTTTCCGAAAGCCCAG | 1343 | 2538 | Negative | | |
| TAGGAATTTTCCGAAAGCCCAGG | 1344 | 2539 | Negative | | |
| TTTCCGAAAGCCCAGGATGATGG | 1345 | 2546 | Negative | | |
| TTCCGAAAGCCCAGGATGATGGG | 1346 | 2547 | Negative | | |
| GAAAGCCCAGGATGATGGGATGG | 1347 | 2551 | Negative | | |
| AAAGCCCAGGATGATGGGATGGG | 1348 | 2552 | Negative | | |
| AGGATGATGGGATGGGAATACAG | 1349 | 2559 | Negative | | |
| GGATGATGGGATGGGAATACAGG | 1350 | 2560 | Negative | | |
| ACAGGTGCAATTTCCGTCCGAAG | 1351 | 2578 | Negative | | |
| CAGGTGCAATTTCCGTCCGAAGG | 1352 | 2579 | Negative | | |
| GCAATTTCCGTCCGAAGGTTTGG | 1353 | 2584 | Negative | | |
| TTCCGTCCGAAGGTTTGGTACAG | 1354 | 2589 | Negative | | |
| CCGAAGGTTTGGTACAGCAACAG | 1355 | 2595 | Negative | | |
| CGAAGGTTTGGTACAGCAACAGG | 1356 | 2596 | Negative | | |
| AAGGTTTGGTACAGCAACAGGAG | 1357 | 2598 | Negative | | |
| AGGTTTGGTACAGCAACAGGAGG | 1358 | 2599 | Negative | | |
| GGTTTGGTACAGCAACAGGAGGG | 1359 | 2600 | Negative | | |
| ACAGCAACAGGAGGGATACATAG | 1360 | 2608 | Negative | | |
| AGCAACAGGAGGGATACATAGAG | 1361 | 2610 | Negative | | |
| GCAACAGGAGGGATACATAGAGG | 1362 | 2611 | Negative | | |
| GGGATACATAGAGGTTCCTTGAG | 1363 | 2620 | Negative | | |
| ATACATAGAGGTTCCTTGAGCAG | 1364 | 2623 | Negative | | |
| CATAGAGGTTCCTTGAGCAGTAG | 1365 | 2626 | Negative | | |
| TTCCTTGAGCAGTAGTCATGCAG | 1366 | 2634 | Negative | | |
| TCCTTGAGCAGTAGTCATGCAGG | 1367 | 2635 | Negative | | |
| GAGCAGTAGTCATGCAGGTTCGG | 1368 | 2640 | Negative | | |
| GTAGTCATGCAGGTTCGGCATGG | 1369 | 2645 | Negative | | |
| GGTTCGGCATGGTCCCGTGCTGG | 1370 | 2656 | Negative | | |
| TCGGCATGGTCCCGTGCTGGTGG | 1371 | 2659 | Negative | | |
| ATGGTCCCGTGCTGGTGGTTGAG | 1372 | 2664 | Negative | | |
| TGGTCCCGTGCTGGTGGTTGAGG | 1373 | 2665 | Negative | | |
| GTGCTGGTGGTTGAGGATCCTGG | 1374 | 2672 | Negative | | |
| GTGGTTGAGGATCCTGGAATTAG | 1375 | 2678 | Negative | | |
| GGTTGAGGATCCTGGAATTAGAG | 1376 | 2680 | Negative | | |
| GTTGAGGATCCTGGAATTAGAGG | 1377 | 2681 | Negative | | |
| TCCTGGAATTAGAGGACAAACGG | 1378 | 2689 | Negative | | |
| CCTGGAATTAGAGGACAAACGGG | 1379 | 2690 | Negative | | |
| AAACGGGCAACATACCTTGATAG | 1380 | 2706 | Negative | | |
| GGCAACATACCTTGATAGTCCAG | 1381 | 2711 | Negative | | |
| AACATACCTTGATAGTCCAGAAG | 1382 | 2714 | Negative | | |
| GATAGTCCAGAAGAACCAACAAG | 1383 | 2724 | Negative | | |
| AGTCCAGAAGAACCAACAAGAAG | 1384 | 2727 | Negative | | |
| AGAAGAACCAACAAGAAGATGAG | 1385 | 2732 | Negative | | |
| GAAGAACCAACAAGAAGATGAGG | 1386 | 2733 | Negative | | |
| ACCAACAAGAAGATGAGGCATAG | 1387 | 2738 | Negative | | |
| AACAAGAAGATGAGGCATAGCAG | 1388 | 2741 | Negative | | |
| AAGAAGATGAGGCATAGCAGCAG | 1389 | 2744 | Negative | | |
| AGAAGATGAGGCATAGCAGCAGG | 1390 | 2745 | Negative | | |
| TGAGGCATAGCAGCAGGATGAAG | 1391 | 2751 | Negative | | |
| AGGCATAGCAGCAGGATGAAGAG | 1392 | 2753 | Negative | | |
| GGCATAGCAGCAGGATGAAGAGG | 1393 | 2754 | Negative | | |
| ATAGCAGCAGGATGAAGAGGAAG | 1394 | 2757 | Negative | | |
| AGGAAGATGATAAAACGCCGCAG | 1395 | 2774 | Negative | | |
| TAAAACGCCGCAGACACATCCAG | 1396 | 2784 | Negative | | |
| CAGACACATCCAGCGATAACCAG | 1397 | 2794 | Negative | | |
| AGACACATCCAGCGATAACCAGG | 1398 | 2795 | Negative | | |
| CATCCAGCGATAACCAGGACAAG | 1399 | 2800 | Negative | | |
| CAGCGATAACCAGGACAAGTTGG | 1400 | 2804 | Negative | | |
| GCGATAACCAGGACAAGTTGGAG | 1401 | 2806 | Negative | | |
| CGATAACCAGGACAAGTTGGAGG | 1402 | 2807 | Negative | | |
| AACCAGGACAAGTTGGAGGACAG | 1403 | 2811 | Negative | | |
| ACCAGGACAAGTTGGAGGACAGG | 1404 | 2812 | Negative | | |
| CAGGACAAGTTGGAGGACAGGAG | 1405 | 2814 | Negative | | |
| AGGACAAGTTGGAGGACAGGAGG | 1406 | 2815 | Negative | | |
| CAAGTTGGAGGACAGGAGGTTGG | 1407 | 2819 | Negative | | |
| TTGGAGGACAGGAGGTTGGTGAG | 1408 | 2823 | Negative | | |
| ACAGGAGGTTGGTGAGTGATTGG | 1409 | 2830 | Negative | | |
| AGGAGGTTGGTGAGTGATTGGAG | 1410 | 2832 | Negative | | |
| GGAGGTTGGTGAGTGATTGGAGG | 1411 | 2833 | Negative | | |
| GTTGGTGAGTGATTGGAGGTTGG | 1412 | 2837 | Negative | | |
| TTGGTGAGTGATTGGAGGTTGGG | 1413 | 2838 | Negative | | |
| TGGTGAGTGATTGGAGGTTGGGG | 1414 | 2839 | Negative | | |
| AGGTTGGGGACTGCGAATTTTGG | 1415 | 2853 | Negative | | |
| GGGGACTGCGAATTTTGGCCAAG | 1416 | 2858 | Negative | | |
| CGAATTTTGGCCAAGACACACGG | 1417 | 2866 | Negative | | |
| ATTTTGGCCAAGACACACGGTAG | 1418 | 2869 | Negative | | |
| AGACACACGGTAGTTCCCCCTAG | 1419 | 2879 | Negative | | |
| GTAGTTCCCCCTAGAAAATTGAG | 1420 | 2888 | Negative | | |
| AGTTCCCCCTAGAAAATTGAGAG | 1421 | 2890 | Negative | | |
| TCCCCCTAGAAAATTGAGAGAAG | 1422 | 2893 | Negative | | |
| AATTGAGAGAAGTCCACCACGAG | 1423 | 2904 | Negative | | |
| AGAGAAGTCCACCACGAGTCTAG | 1424 | 2909 | Negative | | |
| CACCACGAGTCTAGACTCTGCGG | 1425 | 2918 | Negative | | |
| TCTAGACTCTGCGGTATTGTGAG | 1426 | 2927 | Negative | | |
| CTAGACTCTGCGGTATTGTGAGG | 1427 | 2928 | Negative | | |
| TTGTGAGGATTCTTGTCAACAAG | 1428 | 2943 | Negative | | |
| AAAAACCCCGCCTGTAACACGAG | 1429 | 2966 | Negative | | |
| AACCCCGCCTGTAACACGAGAAG | 1430 | 2969 | Negative | | |
| ACCCCGCCTGTAACACGAGAAGG | 1431 | 2970 | Negative | | |
| CCCCGCCTGTAACACGAGAAGGG | 1432 | 2971 | Negative | | |
| CCCGCCTGTAACACGAGAAGGGG | 1433 | 2972 | Negative | | |
| TGTAACACGAGAAGGGGTCCTAG | 1434 | 2978 | Negative | | |
| GTAACACGAGAAGGGGTCCTAGG | 1435 | 2979 | Negative | | |
| GATGTGATGTTCTCCATGTTCAG | 1436 | 3008 | Negative | | |
| GATGTTCTCCATGTTCAGCGCAG | 1437 | 3013 | Negative | | |
| ATGTTCTCCATGTTCAGCGCAGG | 1438 | 3014 | Negative | | |
| TGTTCTCCATGTTCAGCGCAGGG | 1439 | 3015 | Negative | | |
| GCGCAGGGTCCCCAATCCTCGAG | 1440 | 3030 | Negative | | |
| CAGGGTCCCCAATCCTCGAGAAG | 1441 | 3033 | Negative | | |
| TCCTCGAGAAGATTGACGATAAG | 1442 | 3045 | Negative | | |
| CCTCGAGAAGATTGACGATAAGG | 1443 | 3046 | Negative | | |
| CTCGAGAAGATTGACGATAAGGG | 1444 | 3047 | Negative | | |
| CGAGAAGATTGACGATAAGGGAG | 1445 | 3049 | Negative | | |
| AGAAGATTGACGATAAGGGAGAG | 1446 | 3051 | Negative | | |
| GAAGATTGACGATAAGGGAGAGG | 1447 | 3052 | Negative | | |
| GATTGACGATAAGGGAGAGGCAG | 1448 | 3055 | Negative | | |
| TGACGATAAGGGAGAGGCAGTAG | 1449 | 3058 | Negative | | |
| GATAAGGGAGAGGCAGTAGTCGG | 1450 | 3062 | Negative | | |
| GGGAGAGGCAGTAGTCGGAACAG | 1451 | 3067 | Negative | | |
| GGAGAGGCAGTAGTCGGAACAGG | 1452 | 3068 | Negative | | |
| GAGAGGCAGTAGTCGGAACAGGG | 1453 | 3069 | Negative | | |
| AGGGTTTACTGCTCCTGAACTGG | 1454 | 3088 | Negative | | |
| GGTTTACTGCTCCTGAACTGGAG | 1455 | 3090 | Negative | | |
| TGCTCCTGAACTGGAGCCACCAG | 1456 | 3097 | Negative | | |
| TCCTGAACTGGAGCCACCAGCAG | 1457 | 3100 | Negative | | |
| CCTGAACTGGAGCCACCAGCAGG | 1458 | 3101 | Negative | | |
| CTGAACTGGAGCCACCAGCAGGG | 1459 | 3102 | Negative | | |
| GAGCCACCAGCAGGGAAATACAG | 1460 | 3110 | Negative | | |
| AGCCACCAGCAGGGAAATACAGG | 1461 | 3111 | Negative | | |
| GAAATACAGGCCTCTCACTCTGG | 1462 | 3124 | Negative | | |
| AAATACAGGCCTCTCACTCTGGG | 1463 | 3125 | Negative | | |
| CCTCTCACTCTGGGATCTTGCAG | 1464 | 3134 | Negative | | |
| TCTCACTCTGGGATCTTGCAGAG | 1465 | 3136 | Negative | | |
| CTCTGGGATCTTGCAGAGTTTGG | 1466 | 3141 | Negative | | |
| GATCTTGCAGAGTTTGGTGAAAG | 1467 | 3147 | Negative | | |
| ATCTTGCAGAGTTTGGTGAAAGG | 1468 | 3148 | Negative | | |
| CAGAGTTTGGTGAAAGGTTGTGG | 1469 | 3154 | Negative | | |

[0605] Preliminary next-gen sequencing was performed to identify the level of indel formation at top predicted off-target sites (using the Hsu 2013 algorithm), and Applicants' current data shows no indel formation at 3 separate off-target sites for each of 3 separate sgRNAs (g6, g17, g21) in the HepG2.2.15 model system.

[0606] In the plot as depicted in FIG. 73, the columns labeled ‘D’ signify where Applicants used a nuclease-deficient Cas9 as an internal control. The 29 dpt corresponds to 29 days post transduction, where a single lentiviral vector encoding U6-sgRNA and EFS-hSpCas9-2A-Puro was transduced into HepG2.2.15 cells followed by selection with puromycin. The caveat is that the read depth was lower than ideal (˜200-1000+ reads per target site), and that the on-target indels determined in this experiment are somewhat lower than what Applicants saw by Surveyor assay-however, it is promising that after stringent puromycin selection and constitutive expression of Cas9 and sgRNA for 29 days, still no indels are detected at possible off-target sites.

[0607] Additional anti-HBV CRISPR strategies: Previous studies have shown that CRISPR/Cas9 systems can be used for transcriptional activation when nuclease-deficient Cas9 is fused to activator domains. Specifically regarding HBV, it was recently shown that specific perturbations which upregulate APOBEC3A or APOBEC3B activity in HBV-infected hepatocytes can lead to HBV cccDNA clearance by specific C→U→T editing of the HBV genome leading to cccDNA degradation (Lucifora et al. Science 14 Mar. 2014: Vol. 343 no. 6176 pp. 1221-1228). Since the CRISPR-based activation system can specifically upregulate targeted genes, it is possible to target APOBEC3A, APOBEC3B, and/or other antiviral interferon-stimulated genes (ISGs) using this system in order to target HBV cccDNA for degradation. While this is an indirect approach, the advantage here may be that the use of a nuclease-competent Cas9 is not required, potentially reducing the chance of deleterious off-target effects.

### EXAMPLES

[0608] The following examples are given for the purpose of illustrating various embodiments of the invention and are not meant to limit the present invention in any fashion. The present examples, along with the methods described herein are presently representative of preferred embodiments, are exemplary, and are not intended as limitations on the scope of the invention. Changes therein and other uses which are encompassed within the spirit of the invention as defined by the scope of the claims will occur to those skilled in the art.

### Example 1: CRISPR Complex Activity in the Nucleus of a Eukaryotic Cell

[0609] An example type II CRISPR system is the type II CRISPR locus from Streptococcus pyogenes SF370, which contains a cluster of four genes Cas9, Cas1, Cas2, and Csn1, as well as two non-coding RNA elements, tracrRNA and a characteristic array of repetitive sequences (direct repeats) interspaced by short stretches of non-repetitive sequences (spacers, about 30 bp each). In this system, targeted DNA double-strand break (DSB) is generated in four sequential steps (FIG. 2A). First, two non-coding RNAs, the pre-crRNA array and tracrRNA, are transcribed from the CRISPR locus. Second, tracrRNA hybridizes to the direct repeats of pre-crRNA, which is then processed into mature crRNAs containing individual spacer sequences. Third, the mature crRNA: tracrRNA complex directs Cas9 to the DNA target consisting of the protospacer and the corresponding PAM via heteroduplex formation between the spacer region of the crRNA and the protospacer DNA. Finally, Cas9 mediates cleavage of target DNA upstream of PAM to create a DSB within the protospacer (FIG. 2A). This example describes an example process for adapting this RNA-programmable nuclease system to direct CRISPR complex activity in the nuclei of eukaryotic cells.

### Cell Culture and Transfection

[0610] Human embryonic kidney (HEK) cell line HEK 293 FT (Life Technologies) was maintained in Dulbecco's modified Eagle's Medium (DMEM) supplemented with 10% fetal bovine serum (HyClone), 2 mM GlutaMAX (Life Technologies), 100 U/mL penicillin, and 100 μg/mL streptomycin at 37° C. with 5% CO₂ incubation. Mouse neuro2A (N2A) cell line (ATCC) was maintained with DMEM supplemented with 5% fetal bovine serum (HyClone), 2 mM GlutaMAX (Life Technologies), 100 U/mL penicillin, and 100 μg/mL streptomycin at 37° C. with 5% CO₂.

[0611] HEK 293 FT or N2A cells were seeded into 24-well plates (Corning) one day prior to transfection at a density of 200,000 cells per well. Cells were transfected using Lipofectamine 2000 (Life Technologies) following the manufacturer's recommended protocol. For each well of a 24-well plate a total of 800 ng of plasmids were used.

### Surveyor Assay and Sequencing Analysis for Genome Modification

[0612] HEK 293 FT or N2A cells were transfected with plasmid DNA as described above. After transfection, the cells were incubated at 37° C. for 72 hours before genomic DNA extraction. Genomic DNA was extracted using the QuickExtract DNA extraction kit (Epicentre) following the manufacturer's protocol. Briefly, cells were resuspended in QuickExtract solution and incubated at 65° C. for 15 minutes and 98° C. for 10 minutes. Extracted genomic DNA was immediately processed or stored at −20° C.

[0613] The genomic region surrounding a CRISPR target site for each gene was PCR amplified, and products were purified using QiaQuick Spin Column (Qiagen) following manufacturer's protocol. A total of 400 ng of the purified PCR products were mixed with 2 μl 10× Taq polymerase PCR buffer (Enzymatics) and ultrapure water to a final volume of 20 μl, and subjected to a re-annealing process to enable heteroduplex formation: 95° C. for 10 min, 95° C. to 85° C. ramping at −2° C./s, 85° C. to 25° C. at −0.25° C./s, and 25° C. hold for 1 minute. After re-annealing, products were treated with Surveyor nuclease and Surveyor enhancer S (Transgenomics) following the manufacturer's recommended protocol, and analyzed on 4-20% Novex TBE poly-acrylamide gels (Life Technologies). Gels were stained with SYBR Gold DNA stain (Life Technologies) for 30 minutes and imaged with a Gel Doc gel imaging system (Bio-rad). Quantification was based on relative band intensities, as a measure of the fraction of cleaved DNA. FIG. 7 provides a schematic illustration of this Surveyor assay.

### Restriction Fragment Length Polymorphism Assay for Detection of Homologous Recombination.

[0614] HEK 293 FT and N2A cells were transfected with plasmid DNA, and incubated at 37° C. for 72 hours before genomic DNA extraction as described above. The target genomic region was PCR amplified using primers outside the homology arms of the homologous recombination (HR) template. PCR products were separated on a 1% agarose gel and extracted with MinElute GelExtraction Kit (Qiagen). Purified products were digested with HindIII (Fermentas) and analyzed on a 6% Novex TBE poly-acrylamide gel (Life Technologies).

### RNA Secondary Structure Prediction and Analysis

[0615] RNA secondary structure prediction was performed using the online webserver RNAfold developed at Institute for Theoretical Chemistry at the University of Vienna, using the centroid structure prediction algorithm (see e.g. A. R. Gruber et al., 2008, Cell 106 (1): 23-24; and PA Carr and GM Church, 2009, Nature Biotechnology 27 (12): 1151-62).

### RNA Purification

[0616] HEK 293 FT cells were maintained and transfected as stated above. Cells were harvested by trypsinization followed by washing in phosphate buffered saline (PBS). Total cell RNA was extracted with TRI reagent (Sigma) following manufacturer's protocol. Extracted total RNA was quantified using Naonodrop (Thermo Scientific) and normalized to same concentration.

Northern Blot Analysis of crRNA and tracrRNA Expression in Mammalian Cells

[0617] RNAs were mixed with equal volumes of 2× loading buffer (Ambion), heated to 95° C. for 5 min, chilled on ice for 1 min, and then loaded onto 8% denaturing polyacrylamide gels (SequaGel, National Diagnostics) after pre-running the gel for at least 30 minutes. The samples were electrophoresed for 1.5 hours at 40 W limit. Afterwards, the RNA was transferred to Hybond N+ membrane (GE Healthcare) at 300 mA in a semi-dry transfer apparatus (Bio-rad) at room temperature for 1.5 hours. The RNA was crosslinked to the membrane using autocrosslink button on Stratagene UV Crosslinker the Stratalinker (Stratagene). The membrane was pre-hybridized in ULTRAhyb-Oligo Hybridization Buffer (Ambion) for 30 min with rotation at 42° C., and probes were then added and hybridized overnight. Probes were ordered from IDT and labeled with [gamma-³²P] ATP (Perkin Elmer) with T4 polynucleotide kinase (New England Biolabs). The membrane was washed once with pre-warmed (42° C.) 2×SSC, 0.5% SDS for 1 min followed by two 30 minute washes at 42° C. The membrane was exposed to a phosphor screen for one hour or overnight at room temperature and then scanned with a phosphorimager (Typhoon).

### Bacterial CRISPR System Construction and Evaluation

[0618] CRISPR locus elements, including tracrRNA, Cas9, and leader were PCR amplified from Streptococcus pyogenes SF370 genomic DNA with flanking homology arms for Gibson Assembly. Two BsaI type IIS sites were introduced in between two direct repeats to facilitate easy insertion of spacers (FIG. 8). PCR products were cloned into EcoRV-digested pACYC184 downstream of the tet promoter using Gibson Assembly Master Mix (NEB). Other endogenous CRISPR system elements were omitted, with the exception of the last 50 bp of Csn2. Oligos (Integrated DNA Technology) encoding spacers with complimentary overhangs were cloned into the BsaI-digested vector pDC000 (NEB) and then ligated with T7 ligase (Enzymatics) to generate pCRISPR plasmids. Challenge plasmids containing spacers with PAM expression in mammalian cells (expression constructs illustrated in FIG. 6A, with functionality as determined by results of the Surveyor assay shown in FIG. 6B). Transcription start sites are marked as +1, and transcription terminator and the sequence probed by northern blot are also indicated. Expression of processed tracrRNA was also confirmed by Northern blot. FIG. 6C shows results of a Northern blot analysis of total RNA extracted from 293 FT cells transfected with U6 expression constructs carrying long or short tracrRNA, as well as SpCas9 and DR-EMX1 (1)-DR. Left and right panels are from 293 FT cells transfected without or with SpRNase III, respectively. U6 indicate loading control blotted with a probe targeting human U6 snRNA. Transfection of the short tracrRNA expression construct led to abundant levels of the processed form of tracrRNA (˜75 bp). Very low amounts of long tracrRNA are detected on the Northern blot.

[0619] To promote precise transcriptional initiation, the RNA polymerase III-based U6 promoter was selected to drive the expression of tracrRNA (FIG. 2C). Similarly, a U6 promoter-based construct was developed to express a pre-crRNA array consisting of a single spacer flanked by two direct repeats (DRs, also encompassed by the term “tracr-mate sequences”; FIG. 2C). The initial spacer was designed to target a 33-base-pair (bp) target site (30-bp protospacer plus a 3-bp CRISPR motif (PAM) sequence satisfying the NGG recognition motif of Cas9) in the human EMX1 locus (FIG. 2C), a key gene in the development of the cerebral cortex.

[0620] To test whether heterologous expression of the CRISPR system (SpCas9, SpRNase III, tracrRNA, and pre-crRNA) in mammalian cells can achieve targeted cleavage of mammalian chromosomes, HEK 293 FT cells were transfected with combinations of CRISPR components. Since DSBs in mammalian nuclei are partially repaired by the non-homologous end joining (NHEJ) pathway, which leads to the formation of indels, the Surveyor assay was used to detect potential cleavage activity at the target EMX1 locus (FIG. 7) (see e.g. Guschin et al., 2010, Methods Mol Biol 649:247). Co-transfection of all four CRISPR components was able to induce up to 5.0% cleavage in the protospacer (see FIG. 2D). Co-transfection of all CRISPR components minus SpRNase III also induced up to 4.7% indel in the protospacer, suggesting that there may be endogenous mammalian RNases that are capable of assisting with crRNA maturation, such as for example the related Dicer and Drosha enzymes. Removing any of the remaining three components abolished the genome cleavage activity of the CRISPR system (FIG. 2D). Sanger sequencing of amplicons containing the target locus verified the cleavage activity: in 43 sequenced clones, 5 mutated alleles (11.6%) were found. Similar experiments using a variety of guide sequences produced indel percentages as high as 29% (see FIGS. 3-6, 10, and 11). These results define a three-component system for efficient CRISPR-mediated genome modification in mammalian cells. To optimize the cleavage efficiency, Applicants also tested whether different isoforms of tracrRNA affected the cleavage efficiency and found that, in this example system, only the short (89-bp) transcript form was able to mediate cleavage of the human EMX1 genomic locus (FIG. 6B).

[0621] FIG. 12 provides an additional Northern blot analysis of crRNA processing in mammalian cells. FIG. 12A illustrates a schematic showing the expression vector for a single spacer flanked by two direct repeats (DR-EMX1 (1)-DR). The 30 bp spacer targeting the human EMX1 locus protospacer 1 (see FIG. 6) and the direct repeat sequences are shown in the sequence beneath FIG. 12A. The line indicates the region whose reverse-complement sequence was used to generate Northern blot probes for EMX1 (1) crRNA detection. FIG. 12B shows a Northern blot analysis of total RNA extracted from 293 FT cells transfected with U6 expression constructs carrying DR-EMX1 (1)-DR. Left and right panels are from 293 FT cells transfected without or with SpRNase III respectively. DR-EMX1 (1)-DR was processed into mature crRNAs only in the presence of SpCas9 and short tracrRNA and was not dependent on the presence of SpRNase III. The mature crRNA detected from transfected 293 FT total RNA is ˜33 bp and is shorter than the 39-42 bp mature crRNA from S. pyogenes. These results demonstrate that a CRISPR system can be transplanted into eukaryotic cells and reprogrammed to facilitate cleavage of endogenous mammalian target polynucleotides.

[0622] FIG. 2 illustrates the bacterial CRISPR system described in this example. FIG. 2A illustrates a schematic showing the CRISPR locus 1 from Streptococcus pyogenes SF370 and a proposed mechanism of CRISPR-mediated DNA cleavage by this system. Mature crRNA processed from the direct repeat-spacer array directs Cas9 to genomic targets consisting of complimentary protospacers and a protospacer-adjacent motif (PAM). Upon target-spacer base pairing, Cas9 mediates a double-strand break in the target DNA. FIG. 2B illustrates engineering of S. pyogenes Cas9 (SpCas9) and RNase III (SpRNase III) with nuclear localization signals (NLSs) to enable import into the mammalian nucleus. FIG. 2C illustrates mammalian expression of SpCas9 and SpRNase III driven by the constitutive EFla promoter and tracrRNA and pre-crRNA array (DR-Spacer-DR) driven by the RNA Pol3 promoter U6 to promote precise transcription initiation and termination. A protospacer from the human EMX1 locus with a satisfactory PAM sequence is used as the spacer in the pre-crRNA array. FIG. 2D illustrates surveyor nuclease assay for SpCas9-mediated minor insertions and deletions. SpCas9 was expressed with and without SpRNase III, tracrRNA, and a pre-crRNA array carrying the EMX1-target spacer. FIG. 2E illustrates a schematic representation of base pairing between target locus and EMX1-targeting crRNA, as well as an example chromatogram showing a micro deletion adjacent to the SpCas9 cleavage site. FIG. 2F illustrates mutated alleles identified from sequencing analysis of 43 clonal amplicons showing a variety of micro insertions and deletions. Dashes indicate deleted bases, and non-aligned or mismatched bases indicate insertions or mutations. Scale bar=10 μm.

[0623] To further simplify the three-component system, a chimeric crRNA-tracrRNA hybrid design was adapted, where a mature crRNA (comprising a guide sequence) may be fused to a partial tracrRNA via a stem-loop to mimic the natural crRNA: tracrRNA duplex. To increase co-delivery efficiency, a bicistronic expression vector was created to drive co-expression of a chimeric RNA and SpCas9 in transfected cells. In parallel, the bicistronic vectors were used to express a pre-crRNA (DR-guide sequence-DR) with SpCas9, to induce processing into crRNA with a separately expressed tracrRNA (compare FIG. 11B top and bottom). FIG. 8 provides schematic illustrations of bicistronic expression vectors for pre-crRNA array (FIG. 8A) or chimeric crRNA (represented by the short line downstream of the guide sequence insertion site and upstream of the EF1α promoter in FIG. 8B) with hSpCas9, showing location of various elements and the point of guide sequence insertion. The expanded sequence around the location of the guide sequence insertion site in FIG. 8B also shows a partial DR sequence (GTTTTAGAGCTA (SEQ ID NO: 1470)) and a partial tracrRNA sequence (TAGCAAGTTAAAATAAGGCTAGTCCGTTTTT (SEQ ID NO: 1471)). Guide sequences can be inserted between BbsI sites using annealed oligonucleotides. Sequence design for the oligonucleotides are shown below the schematic illustrations in FIG. 8, with appropriate ligation adapters indicated. WPRE represents the Woodchuck hepatitis virus post-transcriptional regulatory element. The efficiency of chimeric RNA-mediated cleavage was tested by targeting the same EMX1 locus described above. Using both Surveyor assay and Sanger sequencing of amplicons, Applicants confirmed that the chimeric RNA design facilitates cleavage of human EMX1 locus with approximately a 4.7% modification rate (FIG. 3).

[0624] Generalizability of CRISPR-mediated cleavage in eukaryotic cells was tested by targeting additional genomic loci in both human and mouse cells by designing chimeric RNA targeting multiple sites in the human EMX1 and PVALB, as well as the mouse Th loci. FIG. 13 illustrates the selection of some additional targeted protospacers in human PVALB (FIG. 13A) and mouse Th (FIG. 13B) loci. Schematics of the gene loci and the location of three protospacers within the last exon of each are provided. The underlined sequences include 30 bp of protospacer sequence and 3 bp at 3′ end corresponding to the PAM sequences. Protospacers on the sense and anti-sense strands are indicated above and below the DNA sequences, respectively. A modification rate of 6.3% and 0.75% was achieved for the human PVALB and mouse Th loci respectively, demonstrating the broad applicability of the CRISPR system in modifying different loci across multiple organisms (FIG. 5). While cleavage was only detected with one out of three spacers for each locus using the chimeric constructs, all target sequences were cleaved with efficiency of indel production reaching 27% when using the co-expressed pre-crRNA arrangement (FIGS. 6 and 13).

[0625] FIG. 11 provides a further illustration that SpCas9 can be reprogrammed to target multiple genomic loci in mammalian cells. FIG. 11A provides a schematic of the human EMX1 locus showing the location of five protospacers, indicated by the underlined sequences. FIG. 11B provides a schematic of the pre-crRNA/trcrRNA complex showing hybridization between the direct repeat region of the pre-crRNA and tracrRNA (top), and a schematic of a chimeric RNA design comprising a 20 bp guide sequence, and tracr mate and tracr sequences consisting of partial direct repeat and tracrRNA sequences hybridized in a hairpin structure (bottom). Results of a Surveyor assay comparing the efficacy of Cas9-mediated cleavage at five protospacers in the human EMX1 locus is illustrated in FIG. 11C. Each protospacer is targeted using either processed pre-crRNA/tracrRNA complex (crRNA) or chimeric RNA (chiRNA).

[0626] Since the secondary structure of RNA can be crucial for intermolecular interactions, a structure prediction algorithm based on minimum free energy and Boltzmann-weighted structure ensemble was used to compare the putative secondary structure of all guide sequences used in the genome targeting experiment (see e.g. Gruber et al., 2008, Nucleic Acids Research, 36: W70). Analysis revealed that in most cases, the effective guide sequences in the chimeric crRNA context were substantially free of secondary structure motifs, whereas the ineffective guide sequences were more likely to form internal secondary structures that could prevent base pairing with the target protospacer DNA. It is thus possible that variability in the spacer secondary structure might impact the efficiency of CRISPR-mediated interference when using a chimeric crRNA.

[0627] Further vector designs for SpCas9 are shown in FIG. 22, which illustrates single expression vectors incorporating a U6 promoter linked to an insertion site for a guide oligo, and a Cbh promoter linked to SpCas9 coding sequence. The vector shown in FIG. 22b includes a tracrRNA coding sequence linked to an H1 promoter.

[0628] In the bacterial assay, all spacers facilitated efficient CRISPR interference (FIG. 3C). These results suggest that there may be additional factors affecting the efficiency of CRISPR activity in mammalian cells.

[0629] To investigate the specificity of CRISPR-mediated cleavage, the effect of single-nucleotide mutations in the guide sequence on protospacer cleavage in the mammalian genome was analyzed using a series of EMX1-targeting chimeric crRNAs with single point mutations (FIG. 3A). FIG. 3B illustrates results of a Surveyor nuclease assay comparing the cleavage efficiency of Cas9 when paired with different mutant chimeric RNAs. Single-base mismatch up to 12-bp 5′ of the PAM substantially abrogated genomic cleavage by SpCas9, whereas spacers with mutations at farther upstream positions retained activity against the original protospacer target (FIG. 3B). In addition to the PAM, SpCas9 has single-base specificity within the last 12-bp of the spacer. Furthermore, CRISPR is able to mediate genomic cleavage as efficiently as a pair of TALE nucleases (TALEN) targeting the same EMX1 protospacer. FIG. 3C provides a schematic showing the design of TALENs targeting EMX1, and FIG. 3D shows a Surveyor gel comparing the efficiency of TALEN and Cas9 (n=3).

[0630] Having established a set of components for achieving CRISPR-mediated gene editing in mammalian cells through the error-prone NHEJ mechanism, the ability of CRISPR to stimulate homologous recombination (HR), a high fidelity gene repair pathway for making precise edits in the genome, was tested. The wild type SpCas9 is able to mediate site-specific DSBs, which can be repaired through both NHEJ and HR. In addition, an aspartate-to-alanine substitution (D10A) in the RuvC I catalytic domain of SpCas9 was engineered to convert the nuclease into a nickase (SpCas9n; illustrated in FIG. 4A) (see e.g. Sapranausaks et al., 2011, Nucleic Acids Resch, 39:9275; Gasiunas et al., 2012, Proc. Natl. Acad. Sci. USA, 109: E2579), such that nicked genomic DNA undergoes the high-fidelity homology-directed repair (HDR). Surveyor assay confirmed that SpCas9n does not generate indels at the EMX1 protospacer target. As illustrated in FIG. 4B, co-expression of EMX1-targeting chimeric crRNA with SpCas9 produced indels in the target site, whereas co-expression with SpCas9n did not (n=3). Moreover, sequencing of 327 amplicons did not detect any indels induced by SpCas9n. The same locus was selected to test CRISPR-mediated HR by co-transfecting HEK 293 FT cells with the chimeric RNA targeting EMX1, hSpCas9 or hSpCas9n, as well as a HR template to introduce a pair of restriction sites (HindIII and NheI) near the protospacer. FIG. 4C provides a schematic illustration of the HR strategy, with relative locations of recombination points and primer annealing sequences (arrows). SpCas9 and SpCas9n indeed catalyzed integration of the HR template into the EMX1 locus. PCR amplification of the target region followed by restriction digest with HindIII revealed cleavage products corresponding to expected fragment sizes (arrows in restriction fragment length polymorphism gel analysis shown in FIG. 4D), with SpCas9 and SpCas9n mediating similar levels of HR efficiencies. Applicants further verified HR using Sanger sequencing of genomic amplicons (FIG. 4E). These results demonstrate the utility of CRISPR for facilitating targeted gene insertion in the mammalian genome. Given the 14-bp (12-bp from the spacer and 2-bp from the PAM) target specificity of the wild type SpCas9, the availability of a nickase can significantly reduce the likelihood of off-target modifications, since single strand breaks are not substrates for the error-prone NHEJ pathway.

[0631] Expression constructs mimicking the natural architecture of CRISPR loci with arrayed spacers (FIG. 2A) were constructed to test the possibility of multiplexed sequence targeting. Using a single CRISPR array encoding a pair of EMX1- and PVALB-targeting spacers, efficient cleavage at both loci was detected (FIG. 4F, showing both a schematic design of the crRNA array and a Surveyor blot showing efficient mediation of cleavage). Targeted deletion of larger genomic regions through concurrent DSBs using spacers against two targets within EMX1 spaced by 119 bp was also tested, and a 1.6% deletion efficacy (3 out of 182 amplicons; FIG. 4G) was detected. This demonstrates that the CRISPR system can mediate multiplexed editing within a single genome.

### Example 2: CRISPR System Modifications and Alternatives

[0632] The ability to use RNA to program sequence-specific DNA cleavage defines a new class of genome engineering tools for a variety of research and industrial applications. Several aspects of the CRISPR system can be further improved to increase the efficiency and versatility of CRISPR targeting. Optimal Cas9 activity may depend on the availability of free Mg²⁺ at levels higher than that present in the mammalian nucleus (see e.g. Jinek et al., 2012, Science, 337:816), and the preference for an NGG motif immediately downstream of the protospacer restricts the ability to target on average every 12-bp in the human genome (FIG. 9, evaluating both plus and minus strands of human chromosomal sequences). Some of these constraints can be overcome by exploring the diversity of CRISPR loci across the microbial metagenome (see e.g. Makarova et al., 2011, Nat Rev Microbiol, 9:467). Other CRISPR loci may be transplanted into the mammalian cellular milieu by a process similar to that described in Example 1. For example, FIG. 10 illustrates adaptation of the Type II CRISPR system from CRISPR 1 of Streptococcus thermophilus LMD-9 for heterologous expression in mammalian cells to achieve CRISPR-mediated genome editing. FIG. 10A provides a Schematic illustration of CRISPR 1 from S. thermophilus LMD-9. FIG. 10B illustrates the design of an expression system for the S. thermophilus CRISPR system. Human codon-optimized hStCas9 is expressed using a constitutive EF1α promoter. Mature versions of tracrRNA and crRNA are expressed using the U6 promoter to promote precise transcription initiation. Sequences from the mature crRNA and tracrRNA are illustrated. A single base indicated by the lower case “a” in the crRNA sequence is used to remove the polyU sequence, which serves as a RNA polIII transcriptional terminator. FIG. 10C provides a schematic showing guide sequences targeting the human EMX1 locus. FIG. 10D shows the results of hStCas9-mediated cleavage in the target locus using the Surveyor assay. RNA guide spacers 1 and 2 induced 14% and 6.4%, respectively. Statistical analysis of cleavage activity across biological replica at these two protospacer sites is also provided in FIG. 5. FIG. 14 provides a schematic of additional protospacer and corresponding PAM sequence targets of the S. thermophilus CRISPR system in the human EMX1 locus. Two protospacer sequences are highlighted and their corresponding PAM sequences satisfying NNAGAAW motif are indicated by underlining 3′ with respect to the corresponding highlighted sequence. Both protospacers target the anti-sense strand.

### Example 3: Sample Target Sequence Selection Algorithm

[0633] A software program is designed to identify candidate CRISPR target sequences on both strands of an input DNA sequence based on desired guide sequence length and a CRISPR motif sequence (PAM) for a specified CRISPR enzyme. For example, target sites for Cas9 from S. pyogenes, with PAM sequences NGG, may be identified by searching for 5′-Nx-NGG-3′ both on the input sequence and on the reverse-complement of the input. Likewise, target sites for Cas9 of S. thermophilus CRISPR1, with PAM sequence NNAGAAW, may be identified by searching for 5′-Nx-NNAGAAW-3′ both on the input sequence and on the reverse-complement of the input. Likewise, target sites for Cas9 of S. thermophilus CRISPR3, with PAM sequence NGGNG, may be identified by searching for 5′-Nx-NGGNG-3′ both on the input sequence and on the reverse-complement of the input. The value “x” in Nx may be fixed by the program or specified by the user, such as 20.

[0634] Since multiple occurrences in the genome of the DNA target site may lead to nonspecific genome editing, after identifying all potential sites, the program filters out sequences based on the number of times they appear in the relevant reference genome. For those CRISPR enzymes for which sequence specificity is determined by a ‘seed’ sequence, such as the 11-12 bp 5′ from the PAM sequence, including the PAM sequence itself, the filtering step may be based on the seed sequence. Thus, to avoid editing at additional genomic loci, results are filtered based on the number of occurrences of the seed: PAM sequence in the relevant genome. The user may be allowed to choose the length of the seed sequence. The user may also be allowed to specify the number of occurrences of the seed: PAM sequence in a genome for purposes of passing the filter. The default is to screen for unique sequences. Filtration level is altered by changing both the length of the seed sequence and the number of occurrences of the sequence in the genome. The program may in addition or alternatively provide the sequence of a guide sequence complementary to the reported target sequence(s) by providing the reverse complement of the identified target sequence(s). An example visualization of some target sites in the human genome is provided in FIG. 18.

[0635] Further details of methods and algorithms to optimize sequence selection can be found in U.S. application Ser. No. 61/064,798 (Attorney docket 44790.11.2022; Broad Reference BI-2012/084); incorporated herein by reference.

### Example 4: Evaluation of Multiple Chimeric crRNA-tracrRNA Hybrids

[0636] This example describes results obtained for chimeric RNAs (chiRNAs; comprising a guide sequence, a tracr mate sequence, and a tracr sequence in a single transcript) having tracr sequences that incorporate different lengths of wild-type tracrRNA sequence. FIG. 16a illustrates a schematic of a bicistronic expression vector for chimeric RNA and Cas9. Cas9 is driven by the CBh promoter and the chimeric RNA is driven by a U6 promoter. The chimeric guide RNA consists of a 20 bp guide sequence (Ns) joined to the tracr sequence (running from the first “U” of the lower strand to the end of the transcript), which is truncated at various positions as indicated. The guide and tracr sequences are separated by the tracr-mate sequence GUUUUAGAGCUA (SEQ ID NO: 92) followed by the loop sequence GAAA. Results of SURVEYOR assays for Cas9-mediated indels at the human EMX1 and PVALB loci are illustrated in FIGS. 16b and 16c, respectively. Arrows indicate the expected SURVEYOR fragments. ChiRNAs are indicated by their “+n” designation, and crRNA refers to a hybrid RNA where guide and tracr sequences are expressed as separate transcripts. Quantification of these results, performed in triplicate, are illustrated by histogram in FIGS. 17a and 17b, corresponding to FIGS. 16b and 16c, respectively (“N.D.” indicates no indels detected). Protospacer IDs and their corresponding genomic target, protospacer sequence, PAM sequence, and strand location are provided in the following Table. Guide sequences were designed to be complementary to the entire protospacer sequence in the case of separate transcripts in the hybrid system, or only to the underlined portion in the case of chimeric RNAs.

TABLE 10

| | | | | SEQ | |
|---|---|---|---|---|---|
| protospacer | genomic | | | ID | |
| ID | target | protospacer sequence (5′ to 3′) | PAM | NO: | strand |
| 1 | EMX1 | GGACATCGATGTCACCTCCAATGACTAGGG | TGG | 1473 | + |
| 2 | EMX1 | CATTGGAGGTGACATCGATGTCCTCCCCAT | TGG | 1474 | − |
| 3 | EMX1 | GGAAGGGCCTGAGTCCGAGCAGAAGAAGAA | GGG | 1475 | + |
| 4 | PVALB | GGTGGCGAGAGGGGCCGAGATTGGGTGTTC | AGG | 1476 | + |
| 5 | PVALB | ATGCAGGAGGGTGGCGAGAGGGGCCGAGAT | TGG | 1477 | + |

[0637] Further details to optimize guide sequences can be found in U.S. application Ser. No. 61/836,127 (Attorney docket 44790.08.2022; Broad Reference BI-2013/004G); incorporated herein by reference.

[0638] Initially, three sites within the EMX1 locus in human HEK 293 FT cells were targeted. Genome modification efficiency of each chiRNA was assessed using the SURVEYOR nuclease assay, which detects mutations resulting from DNA double-strand breaks (DSBs) and their subsequent repair by the non-homologous end joining (NHEJ) DNA damage repair pathway. Constructs designated chiRNA (+n) indicate that up to the +n nucleotide of wild-type tracrRNA is included in the chimeric RNA construct, with values of 48, 54, 67, and 85 used for n. Chimeric RNAs containing longer fragments of wild-type tracrRNA (chiRNA (+67) and chiRNA (+85)) mediated DNA cleavage at all three EMX1 target sites, with chiRNA (+85) in particular demonstrating significantly higher levels of DNA cleavage than the corresponding crRNA/tracrRNA hybrids that expressed guide and tracr sequences in separate transcripts (FIGS. 16b and 17a). Two sites in the PVALB locus that yielded no detectable cleavage using the hybrid system (guide sequence and tracr sequence expressed as separate transcripts) were also targeted using chiRNAs. chiRNA (+67) and chiRNA (+85) were able to mediate significant cleavage at the two PVALB protospacers (FIGS. 16c and 17b).

[0639] For all five targets in the EMX1 and PVALB loci, a consistent increase in genome modification efficiency with increasing tracr sequence length was observed. Without wishing to be bound by any theory, the secondary structure formed by 3′ end of the tracrRNA may play a role in enhancing the rate of CRISPR complex formation.

### Example 5: Cas9 Diversity

[0640] The CRISPR-Cas system is an adaptive immune mechanism against invading exogenous DNA employed by diverse species across bacteria and archaea. The type II CRISPR-Cas9 system consists of a set of genes encoding proteins responsible for the “acquisition” of foreign DNA into the CRISPR locus, as well as a set of genes encoding the “execution” of the DNA cleavage mechanism; these include the DNA nuclease (Cas9), a non-coding transactivating cr-RNA (tracrRNA), and an array of foreign DNA-derived spacers flanked by direct repeats (crRNAs). Upon maturation by Cas9, the tracRNA and crRNA duplex guide the Cas9 nuclease to a target DNA sequence specified by the spacer guide sequences, and mediates double-stranded breaks in the DNA near a short sequence motif in the target DNA that is required for cleavage and specific to each CRISPR-Cas system. The type II CRISPR-Cas systems are found throughout the bacterial kingdom and highly diverse in in Cas9 protein sequence and size, tracrRNA and crRNA direct repeat sequence, genome organization of these elements, and the motif requirement for target cleavage. One species may have multiple distinct CRISPR-Cas systems.

[0641] Applicants evaluated 207 putative Cas9s from bacterial species identified based on sequence homology to known Cas9s and structures orthologous to known subdomains, including the HNH endonuclease domain and the RuvC endonuclease domains [information from the Eugene Koonin and Kira Makarova]. Phylogenetic analysis based on the protein sequence conservation of this set revealed five families of Cas9s, including three groups of large Cas9s (˜1400 amino acids) and two of small Cas9s (˜1100 amino acids) (see FIGS. 19 and 20A-F).

[0642] Further details of Cas9s and mutations of the Cas9 enzyme to convert into a nickase or DNA binding protein and use of same with altered functionality can be found in U.S. application Ser. Nos. 61/836,101 and 61/835,936 (Attorney docket 44790.09.2022 and 4790.07.2022 and Broad Reference BI-2013/004E and BI-2013/004F respectively) incorporated herein by reference.

### Example 6: Cas9 Orthologs

[0643] Applicants analyzed Cas9 orthologs to identify the relevant PAM sequences and the corresponding chimeric guide RNA. Having an expanded set of PAMs provides broader targeting across the genome and also significantly increases the number of unique target sites and provides potential for identifying novel Cas9s with increased levels of specificity in the genome.

[0644] The specificity of Cas9 orthologs can be evaluated by testing the ability of each Cas9 to tolerate mismatches between the guide RNA and its DNA target. For example, the specificity of SpCas9 has been characterized by testing the effect of mutations in the guide RNA on cleavage efficiency. Libraries of guide RNAs were made with single or multiple mismatches between the guide sequence and the target DNA. Based on these findings, target sites for SpCas9 can be selected based on the following guidelines:

[0645] To maximize SpCas9 specificity for editing a particular gene, one should choose a target site within the locus of interest such that potential ‘off-target’ genomic sequences abide by the following four constraints: First and foremost, they should not be followed by a PAM with either 5′-NGG or NAG sequences. Second, their global sequence similarity to the target sequence should be minimized. Third, a maximal number of mismatches should lie within the PAM-proximal region of the off-target site. Finally, a maximal number of mismatches should be consecutive or spaced less than four bases apart.

[0646] Similar methods can be used to evaluate the specificity of other Cas9 orthologs and to establish criteria for the selection of specific target sites within the genomes of target species. As mentioned previously phylogenetic analysis based on the protein sequence conservation of this set revealed five families of Cas9s, including three groups of large Cas9s (˜1400 amino acids) and two of small Cas9s (˜1100 amino acids) (see FIGS. 19 and 20A-F). Further details on Cas orthologs can be found in U.S. application Ser. Nos. 61/836,101 and 61/835,936 (Attorney docket 44790.09.2022 and 4790.07.2022 and Broad Reference BI-2013/004E and BI-2013/004F respectively) incorporated herein by reference.

### Example 7: Methodological Improvement to Simplify Cloning and Delivery

[0647] Rather than encoding the U6-promoter and guide RNA on a plasmid, Applicants amplified the U6 promoter with a DNA oligo to add on the guide RNA. The resulting PCR product may be transfected into cells to drive expression of the guide RNA.

[0648] Example primer pair that allows the generation a PCR product consisting of U6-promoter::guideRNA targeting human Emx1 locus:

Forward Primer:
(SEQ ID NO: 1478)
AAACTCTAGAgagggcctatttcccatgattc
Reverse Primer (carrying the guide RNA, which is
underlined):
(SEQ ID NO: 1479)
acctctagAAAAAAAGCACCGACTCGGTGCCACTTTTTCAAGTTGATAAC
GGACTAGCCTTATTTTAACTTGCTATGCTGTTTTGTTTCCAAAACAGCAT
AGCTCTAAAACCCCTAGTCATTGGAGGTGACGGTGTTTCGTCCTTTCCAC
aag

### Example 8: Methodological Improvement to Improve Activity

[0649] Rather than use pol3 promoters, in particular RNA polymerase III (e.g. U6 or H1 promoters), to express guide RNAs in eukaryotic cells, Applicants express the T7 polymerase in eukaryotic cells to drive expression of guide RNAs using the T7 promoter.

[0650] One example of this system may involve introduction of three pieces of DNA:
[0651] 1. expression vector for Cas9
[0652] 2. expression vector for T7 polymerase
[0653] 3. expression vector containing guideRNA fused to the T7 promoter

### Example 9: Methodological Improvement to Reduce Toxicity of Cas9: Delivery of Cas9 in the Form of mRNA

[0654] Delivery of Cas9 in the form of mRNA enables transient expression of Cas9 in cells, to reduce toxicity. For example, humanized SpCas9 may be amplified using the following primer pair:

Forward Primer (to add on T7 promoter for in
vitro transcription):
(SEQ ID NO: 1480)
TAATACGACTCACTATAGGAAGTGCGCCACCATGGCCCCAA
AGAAGAAGCGG
Reverse Primer (to add on polyA tail):
(SEQ ID NO: 1481)
GGTTTTTTTTTTTTTTTTTTTTTTTTTTTTTTttcttaCTT
TTTCTTTTTTGCCTGGCCG

[0655] Applicants transfect the Cas9 mRNA into cells with either guide RNA in the form of RNA or DNA cassettes to drive guide RNA expression in eukaryotic cells.

### Example 10: Methodological Improvement to Reduce Toxicity of Cas9: Use of an Inducible Promoter

[0656] Applicants transiently turn on Cas9 expression only when it is needed for carrying out genome modification. Examples of inducible system include tetracycline inducible promoters (Tet-On or Tet-Off), small molecule two-hybrid transcription activations systems (FKBP, ABA, etc), or light inducible systems (Phytochrome, LOV domains, or cryptochrome).

### Example 11: Improvement of the Cas9 System for In Vivo Application

[0657] Applicants conducted a Metagenomic search for a Cas9 with small molecular weight. Most Cas9 homologs are fairly large. For example the SpCas9 is around 1368aa long, which is too large to be easily packaged into viral vectors for delivery. A graph representing the length distribution of Cas9 homologs is generated from sequences deposited in GenBank (FIG. 23). Some of the sequences may have been mis-annotated and therefore the exact frequency for each length may not necessarily be accurate. Nevertheless it provides a glimpse at distribution of Cas9 proteins and suggest that there are shorter Cas9 homologs.

[0658] Through computational analysis, Applicants found that in the bacterial strain Campylobacter, there are two Cas9 proteins with less than 1000 amino acids. The sequence for one Cas9 from Campylobacter jejuni is presented below. At this length, CjCas9 can be easily packaged into AAV, lentiviruses, Adenoviruses, and other viral vectors for robust delivery into primary cells and in vivo in animal models. In a preferred embodiment of the invention, the Cas9 protein from S. aureus is used.

>Campylobacter jejuni Cas9 (CjCas9)
(SEQ ID NO: 1482)
MARILAFDIGISSIGWAFSENDELKDCGVRIFTKVENPKTGESLA
LPRRLARSARKRLARRKARLNHLKHLIANEFKLNYEDYQSFDESL
AKAYKGSLISPYELRFRALNELLSKQDFARVILHIAKRRGYDDIK
NSDDKEKGAILKAIKQNEEKLANYQSVGEYLYKEYFQKFKENSKE
FTNVRNKKESYERCIAQSFLKDELKLIFKKQREFGFSFSKKFEEE
VLSVAFYKRALKDFSHLVGNCSFFTDEKRAPKNSPLAFMFVALTR
IINLLNNLKNTEGILYTKDDLNALLNEVLKNGTLTYKQTKKLLGL
SDDYEFKGEKGTYFIEFKKYKEFIKALGEHNLSQDDLNEIAKDIT
LIKDEIKLKKALAKYDLNQNQIDSLSKLEFKDHLNISFKALKLVT
PLMLEGKKYDEACNELNLKVAINEDKKDFLPAFNETYYKDEVTNP
VVLRAIKEYRKVLNALLKKYGKVHKINIELAREVGKNHSQRAKIE
KEQNENYKAKKDAELECEKLGLKINSKNILKLRLFKEQKEFCAYS
GEKIKISDLQDEKMLEIDHIYPYSRSFDDSYMNKVLVFTKQNQEK
LNQTPFEAFGNDSAKWQKIEVLAKNLPTKKQKRILDKNYKDKEQK
NFKDRNLNDTRYIARLVLNYTKDYLDFLPLSDDENTKLNDTQKGS
KVHVEAKSGMLTSALRHTWGFSAKDRNNHLHHAIDAVIIAYANNS
IVKAFSDFKKEQESNSAELYAKKISELDYKNKRKFFEPFSGFRQK
VLDKIDEIFVSKPERKKPSGALHEETFRKEEEFYQSYGGKEGVLK
ALELGKIRKVNGKIVKNGDMFRVDIFKHKKTNKFYAVPIYTMDFA
LKVLPNKAVARSKKGEIKDWILMDENYEFCFSLYKDSLILIQTKD
MQEPEFVYYNAFTSSTVSLIVSKHDNKFETLSKNQKILFKNANEK
EVIAKSIGIQNLKVFEKYIVSALGEVTKAEFRQREDFKK.
The putative tracrRNA element for this CjCas9 is:
(SEQ ID NO: 1483)
TATAATCTCATAAGAAATTTAAAAAGGGACTAAAATAAAGAGTTT
GCGGGACTCTGCGGGGTTACAATCCCCTAAAACCGCTTTTAAAAT
T
The Direct Repeat sequence is:
(SEQ ID NO: 1484)
ATTTTACCATAAAGAAATTTAAAAAGGGACTAAAAC
An example of a chimeric guideRNA for CjCas9 is:
(SEQ ID NO: 1485)
NNNNNNNNNNNNNNNNNNNNGUUUUAGUCCCGAAAGGGACUAAAA
UAAAGAGUUUGCGGGACUCUGCGGGGUUACAAUCCCCUAAAACCG
CUUUU

### Example 12: Cas9 Optimization

[0659] For enhanced function or to develop new functions, Applicants generate chimeric Cas9 proteins by combining fragments from different Cas9 homologs. For example, two example chimeric Cas9 proteins:

[0660] For example, Applicants fused the N-term of St1Cas9 (fragment from this protein is in bold) with C-term of SpCas9 (fragment from this protein is underlined).

>St1(N)Sp(C)Cas9
(SEQ ID NO: 1486)
MSDLVLGLDIGIGSVGVGILNKVTGEIIHKNSRIFPAAQAENNLV
RRTNRQGRRLARRKKHRRVRLNRLFEESGLITDFTKISINLNPYQ
LRVKGLTDELSNEELFIALKNMVKHRGISYLDDASDDGNSSVGDY
AQIVKENSKQLETKTPGQIQLERYQTYGQLRGDFTVEKDGKKHRL
INVFPTSAYRSEALRILQTQQEFNPQITDEFINRYLEILTGKRKY
YHGPGNEKSRTDYGRYRTSGETLDNIFGILIGKCTFYPDEFRAAK
ASYTAQEFNLLNDLNNLTVPTETKKLSKEQKNQIINYVKNEKAMG
PAKLFKYIAKLLSCDVADIKGYRIDKSGKAEIHTFEAYRKMKTLE
TLDIEQMDRETLDKLAYVLTLNTEREGIQEALEHEFADGSFSQKQ
VDELVQFRKANSSIFGKGWHNFSVKLMMELIPELYETSEEQMTIL
TRLGKQKTTSSSNKTKYIDEKLLTEEIYNPVVAKSVRQAIKIVNA
AIKEYGDFDNIVIEMARENQTTQKGQKNSRERMKRIEEGIKELGS
QILKEHPVENTQLQNEKLYLYYLQNGRDMYVDQELDINRLSDYDV
DHIVPQSFLKDDSIDNKVLTRSDKNRGKSDNVPSEEVVKKMKNYW
RQLLNAKLITQRKFDNLTKAERGGLSELDKAGFIKRQLVETRQIT
KHVAQILDSRMNTKYDENDKLIREVKVITLKSKLVSDFRKDFQFY
KVREINNYHHAHDAYLNAVVGTALIKKYPKLESEFVYGDYKVYDV
RKMIAKSEQEIGKATAKYFFYSNIMNFFKTEITLANGEIRKRPLI
ETNGETGEIVWDKGRDFATVRKVLSMPQVNIVKKTEVQTGGFSKE
SILPKRNSDKLIARKKDWDPKKYGGFDSPTVAYSVLVVAKVEKGK
SKKLKSVKELLGITIMERSSFEKNPIDFLEAKGYKEVKKDLIIKL
PKYSLFELENGRKRMLASAGELQKGNELALPSKYVNFLYLASHYE
KLKGSPEDNEQKQLFVEQHKHYLDEIIEQISEFSKRVILADANLD
KVLSAYNKHRDKPIREQAENIIHLFTLTNLGAPAAFKYFDTTIDR
KRYTSTKEVLDATLIHQSITGLYETRIDLSQLGGD
>Sp(N)St1(C)Cas9
(SEQ ID NO: 1487)
MDKKYSIGLDIGTNSVGWAVITDEYKVPSKKFKVLGNTDRHSIKK
NLIGALLFDSGETAEATRLKRTARRRYTRRKNRICYLQEIFSNEM
AKVDDSFFHRLEESFLVEEDKKHERHPIFGNIVDEVAYHEKYPTI
YHLRKKLVDSTDKADLRLIYLALAHMIKFRGHFLIEGDLNPDNSD
VDKLFIQLVQTYNQLFEENPINASGVDAKAILSARLSKSRRLENL
IAQLPGEKKNGLFGNLIALSLGLTPNFKSNFDLAEDAKLQLSKDT
YDDDLDNLLAQIGDQYADLFLAAKNLSDAILLSDILRVNTEITKA
PLSASMIKRYDEHHQDLTLLKALVRQQLPEKYKEIFFDQSKNGYA
GYIDGGASQEEFYKFIKPILEKMDGTEELLVKLNREDLLRKQRTF
DNGSIPHQIHLGELHAILRRQEDFYPFLKDNREKIEKILTFRIPY
YVGPLARGNSRFAWMTRKSEETITPWNFEEVVDKGASAQSFIERM
TNFDKNLPNEKVLPKHSLLYEYFTVYNELTKVKYVTEGMRKPAFL
SGEQKKAIVDLLFKTNRKVTVKQLKEDYFKKIECFDSVEISGVED
RFNASLGTYHDLLKIIKDKDFLDNEENEDILEDIVLTLTLFEDRE
MIEERLKTYAHLFDDKVMKQLKRRRYTGWGRLSRKLINGIRDKQS
GKTILDFLKSDGFANRNFMQLIHDDSLTFKEDIQKAQVSGQGDSL
HEHIANLAGSPAIKKGILQTVKVVDELVKVMGRHKPENIVIEMAR
ETNEDDEKKAIQKIQKANKDEKDAAMLKAANQYNGKAELPHSVFH
GHKQLATKIRLWHQQGERCLYTGKTISIHDLINNSNQFEVDHILP
LSITFDDSLANKVLVYATANQEKGQRTPYQALDSMDDAWSFRELK
AFVRESKTLSNKKKEYLLTEEDISKFDVRKKFIERNLVDTRYASR
VVLNALQEHFRAHKIDTKVSVVRGQFTSQLRRHWGIEKTRDTYHH
HAVDALIIAASSQLNLWKKQKNTLVSYSEDQLLDIETGELISDDE
YKESVFKAPYQHFVDTLKSKEFEDSILFSYQVDSKFNRKISDATI
YATRQAKVGKDKADETYVLGKIKDIYTQDGYDAFMKIYKKDKSKF
LMYRHDPQTFEKVIEPILENYPNKQINEKGKEVPCNPFLKYKEEH
GYIRKYSKKGNGPEIKSLKYYDSKLGNHIDITPKDSNNKVVLQSV
SPWRADVYFNKTTGKYEILGLKYADLQFEKGTGTYKISQEKYNDI
KKKEGVDSDSEFKFTLYKNDLLLVKDTETKEQQLFRFLSRTMPKQ
KHYVELKPYDKQKFEGGEALIKVLGNVANSGQCKKGLGKSNISIY
KVRTDVLGNQHIIKNEGDKPKLDF

[0661] The benefit of making chimeric Cas9 include:
[0662] reduce toxicity
[0663] improve expression in eukaryotic cells
[0664] enhance specificity
[0665] reduce molecular weight of protein, make protein smaller by combining the smallest domains from different Cas9 homologs.

### Altering the PAM Sequence Requirement

### Example 13: Utilization of Cas9 as a Generic DNA Binding Protein

[0666] Applicants used Cas9 as a generic DNA binding protein by mutating the two catalytic domains (D10 and H840) responsible for cleaving both strands of the DNA target. In order to upregulate gene transcription at a target locus Applicants fused the transcriptional activation domain (VP64) to Cas9. Applicants hypothesized that it would be important to see strong nuclear localization of the Cas9-VP64 fusion protein because transcription factor activation strength is a function of time spent at the target. Therefore, Applicants cloned a set of Cas9-VP64-GFP constructs, transfected them into 293 cells and assessed their localization under a fluorescent microscope 12 hours post-transfection.

[0667] The same constructs were cloned as a 2A-GFP rather than a direct fusion in order to functionally test the constructs without a bulky GFP present to interfere. Applicants elected to target the Sox2 locus with the Cas9 transactivator because it could be useful for cellular reprogram and the locus has already been validated as a target for TALE-TF mediated transcriptional activation. For the Sox2 locus Applicants chose eight targets near the transcriptional start site (TSS). Each target was 20 bp long with a neighboring NGG protospacer adjacent motif (PAM). Each Cas9-VP64 construct was co-transfected with each PCR generated chimeric crispr RNA (chiRNA) in 293 cells. 72 hours post transfection the transcriptional activation was assessed using RT-qPCR.

[0668] To further optimize the transcriptional activator, Applicants titrated the ratio of chiRNA (Sox2.1 and Sox2.5) to Cas9 (NLS-VP64-NLS-hSpCas9-NLS-VP64-NLS), transfected into 293 cells, and quantified using RT-qPCR. These results indicate that Cas9 can be used as a generic DNA binding domain to upregulate gene transcription at a target locus.

[0669] Applicants designed a second generation of constructs.

TABLE 11
pLenti-EFla-GFP-2A-6xHis-NLS-VP64-NLS-hSpCsn1(D10A,
H840A)-NLS (‘6xHis’ disclosed as SEQ ID NO: 1488)
pLenti-EF1a-GFP-2A-6xHis-NLS-VP64-NLS-hSpCsn1(D10A,
H840A) (‘6xHis’ disclosed as SEQ ID NO: 1488)
pLenti-EFla-GFP-2A-6xHis-NLS-VP64-NLS-NLS-hSpCsn1(D10A,
H840A) (‘6xHis’ disclosed as SEQ ID NO: 1488)
pLenti-EFla-GFP-2A-6xHis-NLS-hSpCsn1(D10A, H840A)-NLS
(‘6xHis’ disclosed as SEQ ID NO: 1488)
pLenti-EFla-GFP-2A-6xHis-NLS-hSpCsn1(D10A, H840A) (‘6xHis’
disclosed as SEQ ID NO: 1488
pLenti-EFla-GFP-2A-6xHis-NLS-NLS-hSpCsn1(D10A, H840A)
(‘6xHis’ disclosed as SEQ ID NO: 1488)

[0670] Applicants use these constructs to assess transcriptional activation (VP64 fused constructs) and repression (Cas9 only) by RT-qPCR. Applicants assess the cellular localization of each construct using anti-His antibody, nuclease activity using a Surveyor nuclease assay, and DNA binding affinity using a gel shift assay. In a preferred embodiment of the invention, the gel shift assay is an EMSA gel shift assay.

### Example 14: Cas9 Transgenic and Knock in Mice

[0671] To generate a mouse that expresses the Cas9 nuclease Applicants submit two general strategies, transgenic and knock in. These strategies may be applied to generate any other model organism of interest, for e.g. Rat. For each of the general strategies Applicants made a constitutively active Cas9 and a Cas9 that is conditionally expressed (Cre recombinase dependent). The constitutively active Cas9 nuclease is expressed in the following context: pCAG-NLS-Cas9-NLS-P2A-EGFP-WPRE-bGHpolyA. pCAG is the promoter, NLS is a nuclear localization signal, P2A is the peptide cleavage sequence, EGFP is enhanced green fluorescent protein, WPRE is the woodchuck hepatitis virus posttranscriptional regulatory element, and bGHpolyA is the bovine growth hormone poly-A signal sequence (FIGS. 25A-B). The conditional version has one additional stop cassette element, loxP-SV40 polyA x3-loxP, after the promoter and before NLS-Cas9-NLS (i.e. pCAG-loxP-SV40polyAx3-loxP-NLS-Cas9-NLS-P2A-EGFP-WPRE-bGHpolyA). The important expression elements can be visualized as in FIG. 26. The constitutive construct should be expressed in all cell types throughout development, whereas, the conditional construct will only allow Cas9 expression when the same cell is expressing the Cre recombinase. This latter version will allow for tissue specific expression of Cas9 when Cre is under the expression of a tissue specific promoter. Moreover, Cas9 expression could be induced in adult mice by putting Cre under the expression of an inducible promoter such as the TET on or off system.

[0672] Validation of Cas9 constructs: Each plasmid was functionally validated in three ways: 1) transient transfection in 293 cells followed by confirmation of GFP expression; 2) transient transfection in 293 cells followed by immunofluorescence using an antibody recognizing the P2A sequence; and 3) transient transfection followed by Surveyor nuclease assay. The 293 cells may be 293 FT or 293 T cells depending on the cells that are of interest. In a preferred embodiment the cells are 293 FT cells. The results of the Surveyor were run out on the top and bottom row of the gel for the conditional and constitutive constructs, respectively. Each was tested in the presence and absence of chimeric RNA targeted to the hEMX1 locus (chimeric RNA hEMX1.1). The results indicate that the construct can successfully target the hEMX1 locus only in the presence of chimeric RNA (and Cre in the conditional case). The gel was quantified and the results are presented as average cutting efficiency and standard deviation for three samples.

[0673] Transgenic Cas9 mouse: To generate transgenic mice with constructs, Applicants inject pure, linear DNA into the pronucleus of a zygote from a pseudo pregnant CB56 female. Founders are identified, genotyped, and backcrossed to CB57 mice. The constructs were successfully cloned and verified by Sanger sequencing.

[0674] Knock in Cas9 mouse: To generate Cas9 knock in mice Applicants target the same constitutive and conditional constructs to the Rosa26 locus. Applicants did this by cloning each into a Rosa26 targeting vector with the following elements: Rosa26 short homology arm-constitutive/conditional Cas9 expression cassette-pPGK-Neo-Rosa26 long homology arm-pPGK-DTA. pPGK is the promoter for the positive selection marker Neo, which confers resistance to neomycin, a 1 kb short arm, a 4.3 kb long arm, and a negative selection diphtheria toxin (DTA) driven by PGK.

[0675] The two constructs were electroporated into R1 mESCs and allowed to grow for 2 days before neomycin selection was applied. Individual colonies that had survived by days 5-7 were picked and grown in individual wells. 5-7 days later the colonies were harvested, half were frozen and the other half were used for genotyping. Genotyping was done by genomic PCR, where one primer annealed within the donor plasmid (AttpF) and the other outside of the short homology arm (Rosa26-R) Of the 22 colonies harvested for the conditional case, 7 were positive (Left). Of the 27 colonies harvested for the constitutive case, zero were positive (Right). It is likely that Cas9 causes some level of toxicity in the mESC and for this reason there were no positive clones. To test this Applicants introduced a Cre expression plasmid into correctly targeted conditional Cas9 cells and found very low toxicity after many days in culture. The reduced copy number of Cas9 in correctly targeted conditional Cas9 cells (1-2 copies per cell) is enough to allow stable expression and relatively no cytotoxicity. Moreover, this data indicates that the Cas9 copy number determines toxicity. After electroporation each cell should get several copies of Cas9 and this is likely why no positive colonies were found in the case of the constitutive Cas9 construct. This provides strong evidence that utilizing a conditional, Cre-dependent strategy should show reduced toxicity. Applicants inject correctly targeted cells into a blastocyst and implant into a female mouse. Chimerics are identified and backcrossed. Founders are identified and genotyped.

[0676] Utility of the conditional Cas9 mouse: Applicants have shown in 293 cells that the Cas9 conditional expression construct can be activated by co-expression with Cre. Applicants also show that the correctly targeted R1 mESCs can have active Cas9 when Cre is expressed. Because Cas9 is followed by the P2A peptide cleavage sequence and then EGFP Applicants identify successful expression by observing EGFP. This same concept is what makes the conditional Cas9 mouse so useful. Applicants may cross their conditional Cas9 mouse with a mouse that ubiquitously expresses Cre (ACTB-Cre line) and may arrive at a mouse that expresses Cas9 in every cell. It should only take the delivery of chimeric RNA to induce genome editing in embryonic or adult mice. Interestingly, if the conditional Cas9 mouse is crossed with a mouse expressing Cre under a tissue specific promoter, there should only be Cas9 in the tissues that also express Cre. This approach may be used to edit the genome in only precise tissues by delivering chimeric RNA to the same tissue.

### Example 15: Cas9 Diversity and Chimeric RNAs

[0677] The CRISPR-Cas system is an adaptive immune mechanism against invading exogenous DNA employed by diverse species across bacteria and archaea. The type II CRISPR-Cas system consists of a set of genes encoding proteins responsible for the “acquisition” of foreign DNA into the CRISPR locus, as well as a set of genes encoding the “execution” of the DNA cleavage mechanism; these include the DNA nuclease (Cas9), a non-coding transactivating cr-RNA (tracrRNA), and an array of foreign DNA-derived spacers flanked by direct repeats (crRNAs). Upon maturation by Cas9, the tracrRNA and crRNA duplex guide the Cas9 nuclease to a target DNA sequence specified by the spacer guide sequences, and mediates double-stranded breaks in the DNA near a short sequence motif in the target DNA that is required for cleavage and specific to each CRISPR-Cas system. The type II CRISPR-Cas systems are found throughout the bacterial kingdom and highly diverse in in Cas9 protein sequence and size, tracrRNA and crRNA direct repeat sequence, genome organization of these elements, and the motif requirement for target cleavage. One species may have multiple distinct CRISPR-Cas systems.

[0678] Applicants evaluated 207 putative Cas9s from bacterial species identified based on sequence homology to known Cas9s and structures orthologous to known subdomains, including the HNH endonuclease domain and the RuvC endonuclease domains [information from the Eugene Koonin and Kira Makarova]. Phylogenetic analysis based on the protein sequence conservation of this set revealed five families of Cas9s, including three groups of large Cas9s (˜1400 amino acids) and two of small Cas9s (˜1100 amino acids) (FIGS. 19A-D and 20A-F).

[0679] Applicants have also optimized Cas9 guide RNA using in vitro methods.

### Example 16: Cas9 Mutations

[0680] In this example, Applicants show that the following mutations can convert SpCas9 into a nicking enzyme: D10A, E762A, H840A, N854A, N863A, D986A.

[0681] Applicants provide sequences showing where the mutation points are located within the SpCas9 gene (FIG. 24A-M). Applicants also show that the nickases are still able to mediate homologous recombination. Furthermore, Applicants show that SpCas9 with these mutations (individually) do not induce double strand break.

[0682] Cas9 orthologs all share the general organization of 3-4 RuvC domains and a HNH domain. The 5′ most RuvC domain cleaves the non-complementary strand, and the HNH domain cleaves the complementary strand. All notations are in reference to the guide sequence.

[0683] The catalytic residue in 5′ RuvC domain is identified through homology comparison of the Cas9 of interest with other Cas9 orthologs (from S. pyogenes type II CRISPR locus, S. thermophilus CRISPR locus 1, S. thermophilus CRISPR locus 3, and Franciscilla novicida type II CRISPR locus), and the conserved Asp residue is mutated to alanine to convert Cas9 into a complementary-strand nicking enzyme. Similarly, the conserved His and Asn residues in the HNH domains are mutated to Alanine to convert Cas9 into a non-complementary-strand nicking enzyme.

### Example 17: Cas9 Transcriptional Activation and Cas9 Repressor

### Cas9 Transcriptional Activation

[0684] A second generation of constructs were designed and tested (Table 1). These constructs are used to assess transcriptional activation (VP64 fused constructs) and repression (Cas9 only) by RT-qPCR. Applicants assess the cellular localization of each construct using anti-His antibody, nuclease activity using a Surveyor nuclease assay, and DNA binding affinity using a gel shift assay.

### Cas Repressor

[0685] It has been shown previously that dCas9 can be used as a generic DNA binding domain to repress gene expression. Applicants report an improved dCas9 design as well as dCas9 fusions to the repressor domains KRAB and SID4x. From the plasmid library created for modulating transcription using Cas9 in the following Table, the following repressor plasmids were functionally characterized by qPCR: pXRP27, pXRP28, pXRP29, pXRP48, pXRP49, pXRP50, pXRP51, pXRP52, pXRP53, pXRP56, pXRP58, pXRP59, pXRP61, and pXRP62.

[0686] Each dCas9 repressor plasmid was co-transfected with two guide RNAs targeted to the coding strand of the beta-catenin gene. RNA was isolated 72 hours after transfection and gene expression was quantified by RT-qPCR. The endogenous control gene was GAPDH. Two validated shRNAs were used as positive controls. Negative controls were certain plasmids transfected without gRNA, these are denoted as “pXRP ##control”. The plasmids pXRP28, pXRP29, pXRP48, and pXRP49 could repress the beta-catenin gene when using the specified targeting strategy. These plasmids correspond to dCas9 without a functional domain (pXRP28 and pXRP28) and dCas9 fused to SID4x (pXRP48 and pXRP49).

[0687] Further work investigates: repeating the above experiment, targeting different genes, utilizing other gRNAs to determine the optimal targeting position, and multiplexed repression. (Table discloses ‘GGGGS₃’ as SEQ ID NO: 1747, ‘EAAAK₃’ as SEQ ID NO: 1748 and ‘GGGGGS₃’ SEQ ID NO: 1749) Table 12.

pXRP024-pLenti2-EFla-VP64-NLS-FLAG-Linker-dCas9-NLS-gLuc-2A-GFP-WPRE
pXRP025-pLenti2-EFla-VP64-NLS-GGGGS3Linker-dCas9-NLS-gLuc-2A-GFP-WPRE
pXRP026-pLenti2-EFla-VP64-NLS-EAAAK3Linker-dCas9-NLS-gLuc-2A-GFP-WPRE
pXRP027-pLenti2-EFla-NLS-FLAG-Linker-dCas9-NLS-gLuc-2A-GFP-WPRE
pXRP028-pLenti2-EFla-NLS-GGGGS3Linker-dCas9-NLS-gLuc-2A-GFP-WPRE
pXRP029-pLenti2-EFla-NLS-EAAAK3Linker-dCas9-NLS-gLuc-2A-GFP-WPRE
pXRP030-pLenti2-pSV40-VP64-NLS-FLAG-Linker-dCas9-NLS-gLuc-2A-GFP-WPRE
pXRP031-pLenti2-pPGK-VP64-NLS-FLAG-Linker-dCas9-NLS-gLuc-2A-GFP-WPRE
pXRP032-pLenti2-LTR-VP64-NLS-FLAG-Linker-dCas9-NLS-gLuc-2A-GFP-WPRE
pXRP033-pLenti2-pSV40-VP64-NLS-GGGGS3Linker-dCas9-NLS-gLuc-2A-GFP-WPRE
pXRP034-pLenti2-pPGK-VP64-NLS-GGGGS3Linker-dCas9-NLS-gLuc-2A-GFP-WPRE
pXRP035-pLenti2-LTR-VP64-NLS-GGGGS3Linker-dCas9-NLS-gLuc-2A-GFP-WPRE
pXRP036-pLenti2-pSV40-VP64-NLS-EAAAK3Linker-dCas9-NLS-gLuc-2A-GFP-WPRE
pXRP037-pLenti2-pPGK-VP64-NLS-EAAAK3Linker-dCas9-NLS-gLuc-2A-GFP-WPRE
pXRP038-pLenti2-LTR-VP64-NLS-EAAAK3Linker-dCas9-NLS-gLuc-2A-GFP-WPRE
pXRP048-pLenti2-EFla-SID4x-NLS-FLAG-Linker-dCas9-NLS-gLuc-2A-GFP-WPRE
pXRP049-pLenti2-EFla-SID4X-NLS-GGGGS3Linker-dCas9-NLS-gLuc-2A-GFP-WPRE
pXRP050-pLenti2-EFla-SID4X-NLS-EAAAK3Linker-dCas9-NLS-gLuc-2A-GFP-WPRE
pXRP051-pLenti2-EFla-KRAB-NLS-FLAG-Linker-dCas9-NLS-gLuc-2A-GFP-WPRE
pXRP052-pLenti2-EFla-KRAB-NLS-GGGGS3Linker-dCas9-NLS-gLuc-2A-GFP-WPRE
pXRP053-pLenti2-EFla-KRAB-NLS-EAAAK3Linker-dCas9-NLS-gLuc-2A-GFP-WPRE
pXRP054-pLenti2-EFla-dCas9-Linker-FLAG-NLS-VP64-gLuc-2A-GFP-WPRE
pXRP055-pLenti2-EF1a-dCas9-Linker-FLAG-NLS-SID4X-gLuc-2A-GFP-WPRE
pXRP056-pLenti2-EFla-dCas9-Linker-FLAG-NLS-KRAB-gLuc-2A-GFP-WPRE
pXRP057-pLenti2-EFla-dCas9-GGGGGS3-NLS-VP64-gLuc-2A-GFP-WPRE
pXRP058-pLenti2-EFla-dCas9-GGGGGS3-NLS-SID4X-gLuc-2A-GFP-WPRE
pXRP059-pLenti2-EFla-dCas9-GGGGGS3-NLS-KRAB-gLuc-2A-GFP-WPRE
pXRP060-pLenti2-EF1a-dCas9-EAAAK3-NLS-VP64-gLuc-2A-GFP-WPRE
pXRP061-pLenti2-EFla-dCas9-EAAAK3-NLS-SID4X-gLuc-2A-GFP-WPRE
pXRP062-pLenti2-EFla-dCas9-EAAAK3-NLS-KRAB-gLuc-2A-GFP-WPRE
pXRP024-pLenti2-EFla-VP64-NLS-FLAG-Linker-Cas9-NLS-gLuc-2A-GFP-WPRE
pXRP025-pLenti2-EFla-VP64-NLS-GGGGS3Linker-Cas9-NLS-gLuc-2A-GFP-WPRE
pXRP026-pLenti2-EFla-VP64-NLS-EAAAK3Linker-Cas9-NLS-gLuc-2A-GFP-WPRE
pXRP027-pLenti2-EFla-NLS-FLAG-Linker-Cas9-NLS-gLuc-2A-GFP-WPRE
pXRP028-pLenti2-EFla-NLS-GGGGS3Linker-Cas9-NLS-gLuc-2A-GFP-WPRE
pXRP029-pLenti2-EFla-NLS-EAAAK3Linker-Cas9-NLS-gLuc-2A-GFP-WPRE
pXRP030-pLenti2-pSV40-VP64-NLS-FLAG-Linker-Cas9-NLS-gLuc-2A-GFP-WPRE
pXRP031-pLenti2-pPGK-VP64-NLS-FLAG-Linker-Cas9-NLS-gLuc-2A-GFP-WPRE
pXRP032-pLenti2-LTR-VP64-NLS-FLAG-Linker-Cas9-NLS-gLuc-2A-GFP-WPRE
pXRP033-pLenti2-pSV40-VP64-NLS-GGGGS3Linker-Cas9-NLS-gLuc-2A-GFP-WPRE
pXRP034-pLenti2-pPGK-VP64-NLS-GGGGS3Linker-Cas9-NLS-gLuc-2A-GFP-WPRE
pXRP035-pLenti2-LTR-VP64-NLS-GGGGS3Linker-Cas9-NLS-gLuc-2A-GFP-WPRE
pXRP036-pLenti2-pSV40-VP64-NLS-EAAAK3Linker-Cas9-NLS-gLuc-2A-GFP-WPRE
pXRP037-pLenti2-pPGK-VP64-NLS-EAAAK3Linker-Cas9-NLS-gLuc-2A-GFP-WPRE
pXRP038-pLenti2-LTR-VP64-NLS-EAAAK3Linker-Cas9-NLS-gLuc-2A-GFP-WPRE
pXRP048-pLenti2-EFla-SID4x-NLS-FLAG-Linker-Cas9-NLS-gLuc-2A-GFP-WPRE
pXRP049-pLenti2-EFla-SID4X-NLS-GGGGS3Linker-Cas9-NLS-gLuc-2A-GFP-WPRE
pXRP050-pLenti2-EFla-SID4X-NLS-EAAAK3Linker-Cas9-NLS-gLuc-2A-GFP-WPRE
pXRP051-pLenti2-EFla-KRAB-NLS-FLAG-Linker-Cas9-NLS-gLuc-2A-GFP-WPRE
pXRP052-pLenti2-EFla-KRAB-NLS-GGGGS3Linker-Cas9-NLS-gLuc-2A-GFP-WPRE
pXRP053-pLenti2-EFla-KRAB-NLS-EAAAK3Linker-Cas9-NLS-gLuc-2A-GFP-WPRE
pXRP054-pLenti2-EFla-Cas9-Linker-FLAG-NLS-VP64-gLuc-2A-GFP-WPRE
pXRP055-pLenti2-EFla-Cas9-Linker-FLAG-NLS-SID4X-gLuc-2A-GFP-WPRE
pXRP056-pLenti2-EFla-Cas9-Linker-FLAG-NLS-KRAB-gLuc-2A-GFP-WPRE
pXRP057-pLenti2-EFla-Cas9-GGGGGS3-NLS-VP64-gLuc-2A-GFP-WPRE
pXRP058-pLenti2-EFla-Cas9-GGGGGS3-NLS-SID4X-gLuc-2A-GFP-WPRE
pXRP059-pLenti2-EFla-Cas9-GGGGGS3-NLS-KRAB-gLuc-2A-GFP-WPRE
pXRP060-pLenti2-EFla-Cas9-EAAAK3-NLS-VP64-gLuc-2A-GFP-WPRE
pXRP061-pLenti2-EFla-Cas9-EAAAK3-NLS-SID4X-gLuc-2A-GFP-WPRE
pXRP062-pLenti2-EFla-Cas9-EAAAK3-NLS-KRAB-gLuc-2A-GFP-WPRE

### Example 18: Targeted Deletion of Genes Involved in Cholesterol Biosynthesis, Fatty Acid Biosynthesis, and Other Metabolic Disorders, Genes Encoding Mis-Folded Proteins Involved in Amyloid and Other Diseases, Oncogenes Leading to Cellular Transformation, Latent Viral Genes, and Genes Leading to Dominant-Negative Disorders, Amongst Other Disorders

[0688] Applicants demonstrate gene delivery of a CRISPR-Cas system in the liver, brain, ocular, epithelial, hematopoetic, or another tissue of a subject or a patient in need thereof, suffering from metabolic disorders, amyloidosis and protein-aggregation related diseases, cellular transformation arising from genetic mutations and translocations, dominant negative effects of gene mutations, latent viral infections, and other related symptoms, using either viral or nanoparticle delivery system.

[0689] Study Design: Subjects or patients in need thereof suffering from metabolic disorders, amyloidosis and protein aggregation related disease which include but are not limited to human, non-primate human, canine, feline, bovine, equine, other domestic animals and related mammals. The CRISPR-Cas system is guided by a chimeric guide RNA and targets a specific site of the human genomic loci to be cleaved. After cleavage and non-homologous end-joining mediated repair, frame-shift mutation results in knock out of genes.

[0690] Applicants select guide-RNAs targeting genes involved in above-mentioned disorders to be specific to endogenous loci with minimal off-target activity. Two or more guide RNAs may be encoded into a single CRISPR array to induce simultaneous double-stranded breaks in DNA leading to micro-deletions of affected genes or chromosomal regions.

### Identification and Design of Gene Targets

[0691] For each candidate disease gene, Applicants select DNA sequences of interest include protein-coding exons, sequences including and flanking known dominant negative mutation sites, sequences including and flanking pathological repetitive sequences. For gene-knockout approaches, early coding exons closest to the start codon offer best options for achieving complete knockout and minimize possibility of truncated protein products retaining partial function.

[0692] Applicants analyze sequences of interest for all possible targetable 20-bp sequences immediately 5′ to a NGG motif (for SpCas9 system) or a NNAGAAW (for St1Cas9 system). Applicants choose sequences for unique, single RNA-guided Cas9 recognition in the genome to minimize off-target effects based on computational algorithm to determine specificity.

Cloning of Guide Sequences into a Delivery System

[0693] Guide sequences are synthesized as double-stranded 20-24 bp oligonucleotides. After 5′-phosphorylation treatment of oligos and annealing to form duplexes, oligos are ligated into suitable vector depending on the delivery method:

### Virus-Based Delivery Methods

[0694] AAV-based vectors (PX260, 330, 334, 335) have been described elsewhere

[0695] Lentiviral-based vectors use a similar cloning strategy of directly ligating guide sequences into a single vector carrying a U6 promoter-driven chimeric RNA scaffold and a EFla promoter-driven Cas9 or Cas9 nickase.

[0696] Virus production is described elsewhere.

### Nanoparticle-Based RNA Delivery Methods

[0697] 1. Guide sequences are synthesized as an oligonucleotide duplex encoding T7 promoter—guide sequence—chimeric RNA. A T7 promoter is added 5′ of Cas9 by PCR method.

[0698] 2. T7-driven Cas9 and guide-chimeric RNAs are transcribed in vitro, and Cas9 mRNA is further capped and A-tailed using commercial kits. RNA products are purified per kit instructions.

### Hydrodynamic Tail Vein Delivery Methods (for Mouse)

[0699] Guide sequences are cloned into AAV plasmids as described above and elsewhere in this application.

### In Vitro Validation on Cell Lines

### Transfection

### 1. DNA Plasmid Transfection

[0700] Plasmids carrying guide sequences are transfected into human embryonic kidney (HEK293T) or human embryonic stem (hES) cells, other relevant cell types using lipid-, chemical-, or electroporation-based methods. For a 24-well transfection of HEK293T cells (˜260,000 cells), 500 ng of total DNA is transfected into each single well using Lipofectamine 2000. For a 12-well transfection of hES cells, 1 ug of total DNA is transfected into a single well using Fugene HD.

### 2. RNA Transfection

[0701] Purified RNA described above is used for transfection into HEK293T cells. 1-2 ug of RNA may be transfected into ˜260,000 using Lipofectamine 2000 per manufacturer's instruction. RNA delivery of Cas9 and chimeric RNA is shown in FIG. 28.

### Assay of Indel Formation In Vitro

[0702] Cells are harvested 72-hours post-transfection and assayed for indel formation as an indication of double-stranded breaks.

[0703] Briefly, genomic region around target sequence is PCR amplified (˜400-600 bp amplicon size) using high-fidelity polymerase. Products are purified, normalized to equal concentration, and slowly annealed from 95° C. to 4° C. to allow formation of DNA heteroduplexes. Post annealing, the Cel-I enzyme is used to cleave heteroduplexes, and resulting products are separated on a polyacrylamide gel and indel efficiency calculated.

### In Vivo Proof of Principle in Animal

### Delivery Mechanisms

[0704] AAV or Lentivirus production is described elsewhere.

Nanoparticle Formulation: RNA Mixed into Nanoparticle Formulation
Hydrodynamic Tail Vein Injections with DNA Plasmids in Mice are Conducted Using a Commercial Kit

[0705] Cas9 and guide sequences are delivered as virus, nanoparticle-coated RNA mixture, or DNA plasmids, and injected into subject animals. A parallel set of control animals is injected with sterile saline, Cas9 and GFP, or guide sequence and GFP alone.

[0706] Three weeks after injection, animals are tested for amelioration of symptoms and sacrificed. Relevant organ systems analyzed for indel formation. Phenotypic assays include blood levels of HDL, LDL, lipids,

### Assay for Indel Formation

[0707] DNA is extracted from tissue using commercial kits; indel assay will be performed as described for in vitro demonstration.

[0708] Therapeutic applications of the CRISPR-Cas system are amenable for achieving tissue-specific and temporally controlled targeted deletion of candidate disease genes. Examples include genes involved in cholesterol and fatty acid metabolism, amyloid diseases, dominant negative diseases, latent viral infections, among other disorders.

[0709] Examples of a single guide-RNA to introduce targeted indels at a gene locus

| | | | PAM | SEQ ID | | |
|---|---|---|---|---|---|---|
| Disease | GENE | SPACER | | NO: | Mechanism | References |
| Hyper- | HMG- | GCCAA | CGG | 1489 | Knockout | Fluvastatin: a review of its |
| cholesterolemia | CR | ATTGG | | | | pharmacology and use in |
| | | ACGAC | | | | the management of |
| | | CCTCG | | | | hypercholesterolaemia. |
| | | | | | | (Plosker GL et al. Drugs |
| | | | | | | 1996, 51(3): 433-459) |
| Hyper- | SQLE | CGAGG | TGG | 1490 | Knockout | Potential role of nonstatin |
| cholesterolemia | | AGACC | | | | cholesterol lowering agents |
| | | CCCGT | | | | (Trapani et al. IUBMB |
| | | TTCGG | | | | Life, Volume 63, Issue 11, |
| | | | | | | pages 964-971, November |
| | | | | | | 2011) |
| Hyper- | DGAT | CCCGC | AGG | 1491 | Knockout | DGAT1 inhibitors as anti- |
| lipidemia | 1 | CGCCG | | | | obesity and anti-diabetic |
| | | CCGTG | | | | agents. (Birch AM et al. |
| | | GCTCG | | | | Current Opinion in Drug |
| | | | | | | Discovery & Development |
| | | | | | | [2010, 13(4): 489-496) |
| Leukemia | BCR- | TGAGC | AGG | 1492 | Knockout | Killing of leukemic cells |
| | ABL | TCTAC | | | | with a BCR/ABL fusion |
| | | GAGAT | | | | gene by RNA interference |
| | | CCACA | | | | (RNAi).( Fuchs et al. |
| | | | | | | Oncogene 2002, |
| | | | | | | 21(37): 5716-5724) |

[0710] Examples of a pair of guide-RNA to introduce chromosomal microdeletion at a gene locus

| | | | | SEQ ID | | |
|---|---|---|---|---|---|---|
| Disease | GENE | SPACER | PAM | NO: | Mechanism | References |
| Hyper- | PLIN2 | CTCAA | TGG | 1493 | Micro- | Perilipin-2 Null Mice are |
| lipidemia | guide1 | AATTC | | | deletion | Protected Against Diet- |
| | | ATACC | | | | Induced Obesity, Adipose |
| | | GGTTG | | | | Inflammation and Fatty |
| | | | | | | Liver Disease |
| | | | | | | (McManaman JL et al. The |
| | | | | | | Journal of Lipid Research, |
| | | | | | | jlr.M035063. First |
| | | | | | | Published on February 12, |
| | | | | | | 2013) |
| Hyper- | PLIN2 | CGTTA | TGG | 1494 | Micro- | |
| lipidemia | guide2 | AACAA | | | deletion | |
| | | CAACC | | | | |
| | | GGACT | | | | |
| Hyper- | SREBP | TTCAC | ggg | 1495 | Micro- | Inhibition of SREBP by a |
| lipidemia | guide1 | CCCGC | | | deletion | Small Molecule, Betulin, |
| | | GGCGC | | | | Improves Hyperlipidemia |
| | | TGAAT | | | | and Insulin Resistance and |
| | | | | | | Reduces Atherosclerotic |
| | | | | | | Plaques (Tang J et al. Cell |
| | | | | | | Metabolism, Volume 13, |
| | | | | | | Issue 1, 44-56, 5 January |
| | | | | | | 2011) |
| Hyper- | SREBP | ACCAC | agg | 1496 | Micro- | |
| lipidemia | guide2 | TACCA | | | deletion | |
| | | GTCCG | | | | |
| | | TCCAC | | | | |

### Example 19: Targeted Correction of deltaF508 or Other Mutations in Cystic Fibrosis Using AAV

[0711] An aspect of the invention provides for a pharmaceutical composition that may comprise an CRISPR-Cas gene therapy particle and a biocompatible pharmaceutical carrier. According to another aspect, a method of gene therapy for the treatment of a subject having a mutation in the CFTR gene comprises administering a therapeutically effective amount of a CRISPR-Cas gene therapy particle to the cells of a subject.

[0712] This Example demonstrates gene transfer or gene delivery of a CRISPR-Cas system in airways of subject or a patient in need thereof, suffering from cystic fibrosis or from cystic fibrosis related symptoms, using adeno-associated virus (AAV) particles.

[0713] Study Design: Subjects or patients in need there of: Human, non-primate human, canine, feline, bovine, equine and other domestic animals, related. This study tests efficacy of gene transfer of a CRISPR-Cas system by a AAV vector. Applicants determine transgene levels sufficient for gene expression and utilize a CRISPR-Cas system comprising a Cas9 enzyme to target deltaF508 or other CFTR-inducing mutations.

[0714] The treated subjects receive pharmaceutically effective amount of aerosolized AAV vector system per lung endobronchially delivered while spontaneously breathing. The control subjects receive equivalent amount of a pseudotyped AAV vector system with an internal control gene. The vector system may be delivered along with a pharmaceutically acceptable or biocompatible pharmaceutical carrier. Three weeks or an appropriate time interval following vector administration, treated subjects are tested for amelioration of cystic fibrosis related symptoms.

[0715] Applicants use an adenovirus or an AAV particle.

[0716] Applicants clone the following gene constructs, each operably linked to one or more regulatory sequences (Cbh or EF1a promoter for Cas9, U6 or H1 promoter for chimeric guide RNA), into one or more adenovirus or AAV vectors or any other compatible vector: A CFTRdelta508 targeting chimeric guide RNA (FIG. 31B), a repair template for deltaF508 mutation (FIG. 31C) and a codon optimized Cas9 enzyme with optionally one or more nuclear localization signal or sequence(s) (NLS(s)), e.g., two (2) NLSs.

### Identification of Cas9 Target Site

[0717] Applicants analyzed the human CFTR genomic locus and identified the Cas9 target site (FIG. 31A). (PAM may contain a NGG or a NNAGAAW motif).

### Gene Repair Strategy

[0718] Applicants introduce an adenovirus/AAV vector system comprising a Cas9 (or Cas9 nickase) and the guide RNA along with a adenovirus/AAV vector system comprising the homology repair template containing the F508 residue into the subject via one of the methods of delivery discussed earlier. The CRISPR-Cas system is guided by the CFTRdelta 508 chimeric guide RNA and targets a specific site of the CFTR genomic locus to be nicked or cleaved. After cleavage, the repair template is inserted into the cleavage site via homologous recombination correcting the deletion that results in cystic fibrosis or causes cystic fibrosis related symptoms. This strategy to direct delivery and provide systemic introduction of CRISPR systems with appropriate guide RNAs can be employed to target genetic mutations to edit or otherwise manipulate genes that cause metabolic, liver, kidney and protein diseases and other disorders.

### Example 20: Delivery of CRISPR System

[0719] Cas9 and its chimeric guide RNA, or combination of tracrRNA and crRNA, can be delivered either as DNA or RNA. Delivery of Cas9 and guide RNA both as RNA (normal or containing base or backbone modifications) molecules can be used to reduce the amount of time that Cas9 protein persist in the cell. This may reduce the level of off-target cleavage activity in the target cell. Since delivery of Cas9 as mRNA takes time to be translated into protein, it might be advantageous to deliver the guide RNA several hours following the delivery of Cas9 mRNA, to maximize the level of guide RNA available for interaction with Cas9 protein.

[0720] In situations where guide RNA amount is limiting, it may be desirable to introduce Cas9 as mRNA and guide RNA in the form of a DNA expression cassette with a promoter driving the expression of the guide RNA. This way the amount of guide RNA available will be amplified via transcription.

[0721] A variety of delivery systems can be introduced to introduce Cas9 (DNA or RNA) and guide RNA (DNA or RNA) into the host cell. These include the use of liposomes, viral vectors, electroporation, nanoparticles, nanowires (Shalek et al., Nano Letters, 2012), exosomes. Molecular trojan horses liposomes (Pardridge et al., Cold Spring Harb Protoc; 2010; doi: 10.1101/pdb.prot5407) may be used to deliver Cas9 and guide RNA across the blood brain barrier.

### Example 21: Therapeutic Strategies for Trinucleotide Repeat Disorders; Guide Design

[0722] As previously mentioned in the application, the target polynucleotide of a CRISPR complex may include a number of disease-associated genes and polynucleotides and some of these disease associated gene may belong to a set of genetic disorders referred to as Trinucleotide repeat disorders (referred to as also trinucleotide repeat expansion disorders, triplet repeat expansion disorders or codon reiteration disorders).

[0723] These diseases are caused by mutations in which the trinucleotide repeats of certain genes exceed the normal, stable threshold which may usually differ in a gene. The discovery of more repeat expansion disorders has allowed for the classification of these disorders into a number of categories based on underlying similar characteristics. Huntington's disease (HD) and the spinocerebellar ataxias that are caused by a CAG repeat expansion in protein-coding portions of specific genes are included in Category I. Diseases or disorders with expansions that tend to make them phenotypically diverse and include expansions are usually small in magnitude and also found in exons of genes are included in Category II. Category III includes disorders or diseases which are characterized by much larger repeat expansions than either Category I or II and are generally located outside protein coding regions. Examples of Category III diseases or disorders include but are not limited to Fragile X syndrome, myotonic dystrophy, two of the spinocerebellar ataxias, juvenile myoclonic epilepsy, and Friedreich's ataxia.

[0724] Similar therapeutic strategies, like the one mentioned for Friedreich's ataxia below may be adopted to address other trinucleotide repeat or expansion disorders as well. For example, another triple repeat disease that can be treated using almost identical strategy is dystrophia myotonica 1 (DM1), where there is an expanded CTG motif in 3′ UTR. In Friedreich's ataxia, the disease results from expansion of GAA trinucleotides in the first intron of frataxin (FXN). One therapeutic strategy using CRISPR is to excise the GAA repeat from the first intron. The expanded GAA repeat is thought to affect the DNA structure and leads to recruit the formation of heterochromatin which turn off the frataxin gene (FIG. 32A).

[0725] Competitive Advantage over other therapeutic strategies are listed below:

[0726] siRNA knockdown is not applicable in this case, as disease is due to reduced expression of frataxin. Viral gene therapy is currently being explored. HSV-1 based vectors were used to deliver the frataxin gene in animal models and have shown therapeutic effect. However, long term efficacy of virus-based frataxin delivery suffer from several problems: First, it is difficult to regulate the expression of frataxin to match natural levels in health individuals, and second, long term over expression of frataxin leads to cell death.

[0727] Nucleases may be used to excise the GAA repeat to restore healthy genotype, but Zinc Finger Nuclease and TALEN strategies require delivery of two pairs of high efficacy nucleases, which is difficult for both delivery as well as nuclease engineering (efficient excision of genomic DNA by ZFN or TALEN is difficult to achieve).

[0728] In contrast to above strategies, the CRISPR-Cas system has clear advantages. The Cas9 enzyme is more efficient and more multiplexible, by which it is meant that one or more targets can be set at the same time. So far, efficient excision of genomic DNA >30% by Cas9 in human cells and may be as high as 30%, and may be improved in the future. Furthermore, with regard to certain trinucleotide repeat disorders like Huntington's disease (HD), trinucleotide repeats in the coding region may be addressed if there are differences between the two alleles. Specifically, if a HD patient is heterozygous for mutant HTT and there are nucleotide differences such as SNPs between the wt and mutant HTT alleles, then Cas9 may be used to specifically target the mutant HTT allele. ZFN or TALENs will not have the ability to distinguish two alleles based on single base differences.

[0729] In adopting a strategy using the CRISPR-Cas9 enzyme to address Friedreich's ataxia, Applicants design a number of guide RNAs targeting sites flanking the GAA expansion and the most efficient and specific ones are chosen (FIG. 32B).

[0730] Applicants deliver a combination of guide RNAs targeting the intron 1 of FXN along with Cas9 to mediate excision of the GAA expansion region. AAV9 may be used to mediate efficient delivery of Cas9 and in the spinal cord.

[0731] If the Alu element adjacent to the GAA expansion is considered important, there may be constraints to the number of sites that can be targeted but Applicants may adopt strategies to avoid disrupting it.

### Alternative Strategies:

[0732] Rather than modifying the genome using Cas9, Applicants may also directly activate the FXN gene using Cas9 (nuclease activity deficient)-based DNA binding domain to target a transcription activation domain to the FXN gene.

### Example 22: Strategies for Minimizing Off-Target Cleavage Using Cas9 Nickase

[0733] As previously mentioned in the application, Cas9 may be mutated to mediate single strand cleavage via one or more of the following mutations: D10A, E762A, and H840A.

[0734] To mediate gene knockout via NHEJ, Applicants use a nickase version of Cas9 along with two guide RNAs. Off-target nicking by each individual guide RNA may be primarily repaired without mutation, double strand breaks (which can lead to mutations via NHEJ) only occur when the target sites are adjacent to each other. Since double strand breaks introduced by double nicking are not blunt, co-expression of end-processing enzymes such as TREX1 will increase the level of NHEJ activity.

[0735] The following list of targets in tabular form are for genes involved in the following diseases:
[0736] Lafora's Disease—target GSY1 or PPP1R3C (PTG) to reduce glycogen in neurons.
[0737] Hypercholesterolemia—target PCSK9

[0738] Target sequences are listed in pairs (L and R) with different number of nucleotides in the spacer (0 to 3 bp). Each spacer may also be used by itself with the wild type Cas9 to introduce double strand break at the target locus.

TABLE 13

| | | | |
|---|---|---|---|
| GYS1 (human) | GGCC-L | ACCCTTGTTAGCCACCTCCC | SEQ ID NO: 1497 |
| | GGCC-R | GAACGCAGTGCTCTTCGAAG | SEQ ID NO: 1498 |
| | GGNCC-L | CTCACGCCCTGCTCCGTGTA | SEQ ID NO: 1499 |
| | GGNCC-R | GGCGACAACTACTTCCTGGT | SEQ ID NO: 1500 |
| | GGNNCC-L | CTCACGCCCTGCTCCGTGTA | SEQ ID NO: 1501 |
| | GGNNCC-R | GGGCGACAACTACTTCCTGG | SEQ ID NO: 1502 |
| | GGNNNCC- | CCTCTTCAGGGCCGGGGTGG | SEQ ID NO: 1503 |
| | L | | |
| | GGNNNCC- | GAGGACCCAGGTGGAACTGC | SEQ ID NO: 1504 |
| | R | | |
| PCSK9 (human) | GGCC-L | TCAGCTCCAGGCGGTCCTGG | SEQ ID NO: 1505 |
| | GGCC-R | AGCAGCAGCAGCAGTGGCAG | SEQ ID NO: 1506 |
| | GGNCC-L | TGGGCACCGTCAGCTCCAGG | SEQ ID NO: 1507 |
| | GGNCC-R | CAGCAGTGGCAGCGGCCACC | SEQ ID NO: 1508 |
| | GGNNCC-L | ACCTCTCCCCTGGCCCTCAT | SEQ ID NO: 1509 |
| | GGNNCC-R | CCAGGACCGCCTGGAGCTGA | SEQ ID NO: 1510 |
| | GGNNNCC- | CCGTCAGCTCCAGGCGGTCC | SEQ ID NO: 1511 |
| | L | | |
| | GGNNNCC- | AGCAGCAGCAGCAGTGGCAG | SEQ ID NO: 1512 |
| | R | | |
| PPP1R3C | GGCC-L | ATGTGCCAAGCAAAGCCTCA | SEQ ID NO: 1513 |
| (PTG) | GGCC-R | TTCGGTCATGCCCGTGGATG | SEQ ID NO: 1514 |
| (human) | GGNCC-L | GTCGTTGAAATTCATCGTAC | SEQ ID NO: 1515 |
| | GGNCC-R | ACCACCTGTGAAGAGTTTCC | SEQ ID NO: 1516 |
| | GGNNCC-L | CGTCGTTGAAATTCATCGTA | SEQ ID NO: 1517 |
| | GGNNCC-R | ACCACCTGTGAAGAGTTTCC | SEQ ID NO: 1518 |
| Gys1 (mouse) | GGCC-L | GAACGCAGTGCTTTTCGAGG | SEQ ID NO: 1519 |
| | GGCC-R | ACCCTTGTTGGCCACCTCCC | SEQ ID NO: 1520 |
| | GGNCC-L | GGTGACAACTACTATCTGGT | SEQ ID NO: 1521 |
| | GGNCC-R | CTCACACCCTGCTCCGTGTA | SEQ ID NO: 1522 |
| | GGNNCC-L | GGGTGACAACTACTATCTGG | SEQ ID NO: 1523 |
| | GGNNCC-R | CTCACACCCTGCTCCGTGTA | SEQ ID NO: 1524 |
| | GGNNNCC- | CGAGAACGCAGTGCTTTTCG | SEQ ID NO: 1525 |
| | L | | |
| | GGNNNCC- | ACCCTTGTTGGCCACCTCCC | SEQ ID NO: 1526 |
| | R | | |
| PPP1R3C (PTG) | GGCC-L | ATGAGCCAAGCAAATCCTCA | SEQ ID NO: 1527 |
| (mouse) | GGCC-R | TTCCGTCATGCCCGTGGACA | SEQ ID NO: 1528 |
| | GGNCC-L | CTTCGTTGAAAACCATTGTA | SEQ ID NO: 1529 |
| | GGNCC-R | CCACCTCTGAAGAGTTTCCT | SEQ ID NO: 1530 |
| | GGNNCC-L | CTTCGTTGAAAACCATTGTA | SEQ ID NO: 1531 |
| | GGNNCC-R | ACCACCTCTGAAGAGTTTCC | SEQ ID NO: 1532 |
| | GGNNNCC- | CTTCCACTCACTCTGCGATT | SEQ ID NO: 1533 |
| | L | | |
| | GGNNNCC- | ACCATGTCTCAGTGTCAAGC | SEQ ID NO: 1534 |
| | R | | |
| PCSK9 (mouse) | GGCC-L | GGCGGCAACAGCGGCAACAG | SEQ ID NO: 1535 |
| | GGCC-R | ACTGCTCTGCGTGGCTGCGG | SEQ ID NO: 1536 |
| | GGNNCC-L | CCGCAGCCACGCAGAGCAGT | SEQ ID NO: 1537 |
| | GGNNCC-R | GCACCTCTCCTCGCCCCGAT | SEQ ID NO: 1538 |

[0739] Alternative strategies for improving stability of guide RNA and increasing specificity
[0740] 1 Nucleotides in 5′ of the guide RNA may be linked via thiolester linkages rather than phosphoester linkage like in natural RNA. Thiolester linkage may prevent the guide RNA from being digested by endogenous RNA degradation machinery.
[0741] 2. Nucleotides in the guide sequence (5′ 20 bp) of the guide RNA can use bridged nucleic acids (BNA) as the bases to improve the binding specificity.

### Example 23: CRISPR-Cas for Rapid, Multiplex Genome Editing

[0742] Aspects of the invention relate to protocols and methods by which efficiency and specificity of gene modification may be tested within 3-4 days after target design, and modified clonal cell lines may be derived within 2-3 weeks.

[0743] Programmable nucleases are powerful technologies for mediating genome alteration with high precision. The RNA-guided Cas9 nuclease from the microbial CRISPR adaptive immune system can be used to facilitate efficient genome editing in eukaryotic cells by simply specifying a 20-nt targeting sequence in its guide RNA. Applicants describe a set of protocols for applying Cas9 to facilitate efficient genome editing in mammalian cells and generate cell lines for downstream functional studies. Beginning with target design, efficient and specific gene modification can be achieved within 3-4 days, and modified clonal cell lines can be derived within 2-3 weeks.

[0744] The ability to engineer biological systems and organisms holds enormous potential for applications across basic science, medicine, and biotechnology. Programmable sequence-specific endonucleases that facilitate precise editing of endogenous genomic loci are now enabling systematic interrogation of genetic elements and causal genetic variations in a broad range of species, including those that have not been genetically tractable previously. A number of genome editing technologies have emerged in recent years, including zinc finger nucleases (ZFNs), transcription activator-like effector nucleases (TALENs), and the RNA-guided CRISPR-Cas nuclease system. The first two technologies use a common strategy of tethering endonuclease catalytic domains to modular DNA-binding proteins for inducing targeted DNA double stranded breaks (DSB) at specific genomic loci. By contrast, Cas9 is a nuclease guided by small RNAs through Watson-Crick base-pairing with target DNA, presenting a system that is easy to design, efficient, and well-suited for high-throughput and multiplexed gene editing for a variety of cell types and organisms. Here Applicants describe a set of protocols for applying the recently developed Cas9 nuclease to facilitate efficient genome editing in mammalian cells and generate cell lines for downstream functional studies.

[0745] Like ZFNs and TALENs, Cas9 promotes genome editing by stimulating DSB at the target genomic loci. Upon cleavage by Cas9, the target locus undergoes one of two major pathways for DNA damage repair, the error-prone non-homologous end joining (NHEJ) or the high-fidelity homology directed repair (HDR) pathway. Both pathways may be utilized to achieve the desired editing outcome.

[0746] NHEJ: In the absence of a repair template, the NHEJ process re-ligates DSBs, which may leave a scar in the form of indel mutations. This process can be harnessed to achieve gene knockouts, as indels occurring within a coding exon may lead to frameshift mutations and a premature stop codon. Multiple DSBs may also be exploited to mediate larger deletions in the genome.

[0747] HDR: Homology directed repair is an alternate major DNA repair pathway to NHEJ. Although HDR typically occurs at lower frequencies than NHEJ, it may be harnessed to generate precise, defined modifications at a target locus in the presence of an exogenously introduced repair template. The repair template may be either in the form of double stranded DNA, designed similarly to conventional DNA targeting constructs with homology arms flanking the insertion sequence, or single-stranded DNA oligonucleotides (ssODNs). The latter provides an effective and simple method for making small edits in the genome, such as the introduction of single nucleotide mutations for probing causal genetic variations. Unlike NHEJ, HDR is generally active only in dividing cells and its efficiency varies depending on the cell type and state.

[0748] Overview of CRISPR: The CRISPR-Cas system, by contrast, is at minimum a two-component system consisting of the Cas9 nuclease and a short guide RNA. Re-targeting of Cas9 to different loci or simultaneous editing of multiple genes simply requires cloning a different 20-bp oligonucleotide. Although specificity of the Cas9 nuclease has yet to be thoroughly elucidated, the simple Watson-Crick base-pairing of the CRISPR-Cas system is likely more predictable than that of ZFN or TALEN domains.

[0749] The type II CRISPR-Cas (clustered regularly interspaced short palindromic repeats) is a bacterial adaptive immune system that uses Cas9, to cleave foreign genetic elements. Cas9 is guided by a pair of non-coding RNAs, a variable crRNA and a required auxiliary tracrRNA. The crRNA contains a 20-nt guide sequence determines specificity by locating the target DNA via Watson-Crick base-pairing. In the native bacterial system, multiple crRNAs are co-transcribed to direct Cas9 against various targets. In the CRISPR-Cas system derived from Streptococcus pyogenes, the target DNA must immediately precede a 5′-NGG/NRG protospacer adjacent motif (PAM), which can vary for other CRISPR systems.

[0750] CRISPR-Cas is reconstituted in mammalian cells through the heterologous expression of human codon-optimized Cas9 and the requisite RNA components. Furthermore, the crRNA and tracrRNA can be fused to create a chimeric, synthetic guide RNA (sgRNA). Cas9 can thus be re-directed toward any target of interest by altering the 20-nt guide sequence within the sgRNA.

[0751] Given its ease of implementation and multiplex capability, Cas9 has been used to generate engineered eukaryotic cells carrying specific mutations via both NHEJ and HDR. In addition, direct injection of sgRNA and mRNA encoding Cas9 into embryos has enabled the rapid generation of transgenic mice with multiple modified alleles; these results hold promise for editing organisms that are otherwise genetically intractable.

[0752] A mutant Cas9 carrying a disruption in one of its catalytic domains has been engineered to nick rather than cleave DNA, allowing for single-stranded breaks and preferential repair through HDR, potentially ameliorating unwanted indel mutations from off-target DSBs. Additionally, a Cas9 mutant with both DNA-cleaving catalytic residues mutated has been adapted to enable transcriptional regulation in E. coli, demonstrating the potential of functionalizing Cas9 for diverse applications. Certain aspects of the invention relate to the construction and application of Cas9 for multiplexed editing of human cells.

[0753] Applicants have provided a human codon-optimized, nuclear localization sequence-flanked Cas9 to facilitate eukaryotic gene editing. Applicants describe considerations for designing the 20-nt guide sequence, protocols for rapid construction and functional validation of sgRNAs, and finally use of the Cas9 nuclease to mediate both NHEJ- and HDR-based genome modifications in human embryonic kidney (HEK-293 FT) and human stem cell (HUES9) lines. This protocol can likewise be applied to other cell types and organisms.

[0754] Target selection for sgRNA: There are two main considerations in the selection of the 20-nt guide sequence for gene targeting: 1) the target sequence should precede 5′-NGG PAM for S. pyogenes Cas9, and 2) guide sequences should be chosen to minimize off-target activity. Applicants provided an online Cas9 targeting design tool that takes an input sequence of interest and identifies suitable target sites. To experimentally assess off-target modifications for each sgRNA, Applicants also provide computationally predicted off-target sites for each intended target, ranked according to Applicants' quantitative specificity analysis on the effects of base-pairing mismatch identity, position, and distribution.

[0755] The detailed information on computationally predicted off-target sites is as follows:

[0756] Considerations for Off-target Cleavage Activities: Similar to other nucleases, Cas9 can cleave off-target DNA targets in the genome at reduced frequencies. The extent to which a given guide sequence exhibit off-target activity depends on a combination of factors including enzyme concentration, thermodynamics of the specific guide sequence employed, and the abundance of similar sequences in the target genome. For routine application of Cas9, it is important to consider ways to minimize the degree of off-target cleavage and also to be able to detect the presence of off-target cleavage.

[0757] Minimizing off-target activity: For application in cell lines, Applicants recommend following two steps to reduce the degree of off-target genome modification. First, using Applicants' online CRISPR target selection tool, it is possible to computationally assess the likelihood of a given guide sequence to have off-target sites. These analyses are performed through an exhaustive search in the genome for off-target sequences that are similar sequences as the guide sequence. Comprehensive experimental investigation of the effect of mismatching bases between the sgRNA and its target DNA revealed that mismatch tolerance is 1) position dependent—the 8-14 bp on 3′ end of the guide sequence are less tolerant of mismatches than the 5′ bases, 2) quantity dependent—in general more than 3 mismatches are not tolerated, 3) guide sequence dependent—some guide sequences are less tolerant of mismatches than others, and 4) concentration dependent—off-target cleavage is highly sensitive to the amount of transfected DNA. The Applicants' target site analysis web tool (available at the website genome-engineering.org/tools) integrates these criteria to provide predictions for likely off-target sites in the target genome. Second, Applicants recommend titrating the amount of Cas9 and sgRNA expression plasmid to minimize off-target activity.

[0758] Detection of off-target activities: Using Applicants' CRISPR targeting web tool, it is possible to generate a list of most likely off-target sites as well as primers performing SURVEYOR or sequencing analysis of those sites. For isogenic clones generated using Cas9, Applicants strongly recommend sequencing these candidate off-target sites to check for any undesired mutations. It is worth noting that there may be off target modifications in sites that are not included in the predicted candidate list and full genome sequence should be performed to completely verify the absence of off-target sites. Furthermore, in multiplex assays where several DSBs are induced within the same genome, there may be low rates of translocation events and can be evaluated using a variety of techniques such as deep sequencing.

[0759] The online tool provides the sequences for all oligos and primers necessary for 1) preparing the sgRNA constructs, 2) assaying target modification efficiency, and 3) assessing cleavage at potential off-target sites. It is worth noting that because the U6 RNA polymerase III promoter used to express the sgRNA prefers a guanine (G) nucleotide as the first base of its transcript, an extra G is appended at 5′ of the sgRNA where the 20-nt guide sequence does not begin with G.

[0760] Approaches for sgRNA construction and delivery: Depending on the desired application, sgRNAs may be delivered as either 1) PCR amplicons containing an expression cassette or 2) sgRNA-expressing plasmids. PCR-based sgRNA delivery appends the custom sgRNA sequence onto the reverse PCR primer used to amplify a U6 promoter template. The resulting amplicon may be co-transfected with a plasmid containing Cas9 (PX165). This method is optimal for rapid screening of multiple candidate sgRNAs, as cell transfections for functional testing can be performed mere hours after obtaining the sgRNA-encoding primers. Because this simple method obviates the need for plasmid-based cloning and sequence verification, it is well suited for testing or co-transfecting a large number of sgRNAs for generating large knockout libraries or other scale-sensitive applications. Note that the sgRNA-encoding primers are over 100-bp, compared to the ˜20-bp oligos required for plasmid-based sgRNA delivery.

[0761] Construction of an expression plasmid for sgRNA is also simple and rapid, involving a single cloning step with a pair of partially complementary oligonucleotides. After annealing the oligo pairs, the resulting guide sequences may be inserted into a plasmid bearing both Cas9 and an invariant scaffold bearing the remainder of the sgRNA sequence (PX330). The transfection plasmids may also be modified to enable virus production for in vivo delivery.

[0762] In addition to PCR and plasmid-based delivery methods, both Cas9 and sgRNA can be introduced into cells as RNA.

[0763] Design of repair template: Traditionally, targeted DNA modifications have required use of plasmid-based donor repair templates that contain homology arms flanking the site of alteration. The homology arms on each side can vary in length, but are typically longer than 500 bp. This method can be used to generate large modifications, including insertion of reporter genes such as fluorescent proteins or antibiotic resistance markers. The design and construction of targeting plasmids has been described elsewhere.

[0764] More recently, single-stranded DNA oligonucleotides (ssODNs) have been used in place of targeting plasmids for short modifications within a defined locus without cloning. To achieve high HDR efficiencies, ssODNs contain flanking sequences of at least 40 bp on each side that are homologous to the target region, and can be oriented in either the sense or antisense direction relative to the target locus.

### Functional Testing

[0765] SURVEYOR nuclease assay: Applicants detected indel mutations either by the SURVEYOR nuclease assay (or PCR amplicon sequencing. Applicants online CRISPR target design tool provides recommended primers for both approaches. However, SURVEYOR or sequencing primers may also be designed manually to amplify the region of interest from genomic DNA and to avoid non-specific amplicons using NCBI Primer-BLAST. SURVEYOR primers should be designed to amplify 300-400 bp (for a 600-800 bp total amplicon) on either side of the Cas9 target for allowing clear visualization of cleavage bands by gel electrophoresis. To prevent excessive primer dimer formation, SURVEYOR primers should be designed to be typically under 25-nt long with melting temperatures of ˜60° C. Applicants recommend testing each pair of candidate primers for specific PCR amplicons as well as for the absence of non-specific cleavage during the SURVEYOR nuclease digestion process.

[0766] Plasmid- or ssODN-mediated HDR: HDR can be detected via PCR-amplification and sequencing of the modified region. PCR primers for this purpose should anneal outside the region spanned by the homology arms to avoid false detection of residual repair template (HDR Fwd and Rev, FIG. 30). For ssODN-mediated HDR, SURVEYOR PCR primers can be used.

[0767] Detection of indels or HDR by sequencing: Applicants detected targeted genome modifications by either Sanger or next-generation deep sequencing (NGS). For the former, genomic DNA from modified region can be amplified using either SURVEYOR or HDR primers. Amplicons should be subcloned into a plasmid such as pUC19 for transformation; individual colonies can be sequenced to reveal clonal genotype.

[0768] Applicants designed next-generation sequencing (NGS) primers for shorter amplicons, typically in the 100-200 bp size range. For detecting NHEJ mutations, it is important to design primers with at least 10-20 bp between the priming regions and the Cas9 target site to allow detection of longer indels. Applicants provide guidelines for a two-step PCR method to attach barcoded adapters for multiplex deep sequencing. Applicants recommend the Illumina platform, due to its generally low levels of false positive indels. Off-target analysis (described previously) can then be performed through read alignment programs such as ClustalW, Geneious, or simple sequence analysis scripts.

### Materials and Reagents

### Sgrna Preparation:

[0769] UltraPure DNaseRNase-free distilled water (Life Technologies, cat. no. 10977-023)
[0770] Herculase II fusion polymerase (Agilent Technologies, cat. no. 600679)
[0771] CRITICAL. Standard Taq polymerase, which lacks 3′-5′ exonuclease proofreading activity, has lower fidelity and can lead to amplification errors. Herculase II is a high-fidelity polymerase (equivalent fidelity to Pfu) that produces high yields of PCR product with minimal optimization. Other high-fidelity polymerases may be substituted.
[0772] Herculase II reaction buffer (5×; Agilent Technologies, included with polymerase)
[0773] dNTP solution mix (25 mM each; Enzymatics, cat. no. N205L)
[0774] MgCl2 (25 mM; ThermoScientific, cat. no. R0971)
[0775] QIAquick gel extraction kit (Qiagen, cat. no. 28704)
[0776] QIAprep spin miniprep kit (Qiagen, cat. no. 27106)
[0777] UltraPure TBE buffer (10×; Life Technologies, cat. no. 15581-028)
[0778] SeaKem LE agarose (Lonza, cat. no. 50004)
[0779] SYBR Safe DNA stain (10,000×; Life Technologies, cat. no. S33102)
[0780] 1-kb Plus DNA ladder (Life Technologies, cat. no. 10787-018)
[0781] TrackIt CyanOrange loading buffer (Life Technologies, cat. no. 10482-028)
[0782] FastDigest BbsI (BpiI) (Fermentas/ThermoScientific, cat. no. FD1014)
[0783] Fermentas Tango Buffer (Fermentas/ThermoScientific, cat. no. BY5)
[0784] DL-dithiothreitol (DTT; Fermentas/ThermoScientific, cat. no. R0862)
[0785] T7 DNA ligase (Enzymatics, cat. no. L602L)
[0786] Critical: Do not substitute the more commonly used T4 ligase. T7 ligase has 1,000-fold higher activity on the sticky ends than on the blunt ends and higher overall activity than commercially available concentrated T4 ligases.
[0787] T7 2× Rapid Ligation Buffer (included with T7 DNA ligase, Enzymatics, cat. no. L602L)
[0788] T4 Polynucleotide Kinase (New England Biolabs, cat. no M0201S)
[0789] T4 DNA Ligase Reaction Buffer (10×; New England Biolabs, cat. no B0202S)
[0790] Adenosine 5′-triphosphate (10 mM; New England Biolabs, cat. no. P0756S)
[0791] PlasmidSafe ATP-dependent DNase (Epicentre, cat. no. E3101K)
[0792] One Shot Stbl3 chemically competent Escherichia coli (E. coli) (Life Technologies, cat. no. C7373-03)
[0793] SOC medium (New England Biolabs, cat. no. B9020S)
[0794] LB medium (Sigma, cat. no. L3022)
[0795] LB agar medium (Sigma, cat. no. L2897)
[0796] Ampicillin, sterile filtered (100 mg ml-1; Sigma, cat. no. A5354)

### Mammalian Cell Culture:

[0797] HEK293FT cells (Life Technologies, cat. no. R700-07)
[0798] Dulbecco's minimum Eagle's medium (DMEM, 1×, high glucose; Life Technologies, cat. no. 10313-039)
[0799] Dulbecco's minimum Eagle's medium (DMEM, 1×, high glucose, no phenol red; Life Technologies, cat. no. 31053-028)
[0800] Dulbecco's phosphate-buffered saline (DPBS, 1×; Life Technologies, cat. no. 14190-250)
[0801] Fetal bovine serum, qualified and heat inactivated (Life Technologies, cat. no. 10438-034)
[0802] Opti-MEM I reduced-serum medium (FBS; Life Technologies, cat. no. 11058-021)
[0803] Penicillin-streptomycin (100×; Life Technologies, cat. no. 15140-163)
[0804] TrypLE™ Express (1×, no Phenol Red; Life Technologies, cat. no. 12604-013)
[0805] Lipofectamine 2000 transfection reagent (Life Technologies, cat. no. 11668027)
[0806] Amaxa SF Cell Line 4D-Nucleofector® X Kit S (32 RCT; Lonza, cat. no V4XC-2032)
[0807] HUES 9 cell line (HARVARD STEM CELL SCIENCE)
[0808] Geltrex LDEV-Free Reduced Growth Factor Basement Membrane Matrix (Life Technologies, cat. no. A1413201)
[0809] mTeSR1 medium (Stemcell Technologies, cat. no. 05850)
[0810] Accutase cell detachment solution (Stemcell Technologies, cat. no. 07920)
[0811] ROCK Inhibitor (Y-27632; Millipore, cat. no. SCM075)
[0812] Amaxa P3 Primary Cell 4D-Nucleofector® X Kit S (32 RCT; Lonza cat. no. V4XP-3032)

### Genotyping Analysis:

[0813] QuickExtract DNA extraction solution (Epicentre, cat. no. QE09050)
[0814] PCR primers for SURVEYOR, RFLP analysis, or sequencing (see Primer table)
[0815] Herculase II fusion polymerase (Agilent Technologies, cat. no. 600679)
[0816] CRITICAL. As Surveyor assay is sensitive to single-base mismatches, it is particularly important to use a high-fidelity polymerase. Other high-fidelity polymerases may be substituted.
[0817] Herculase II reaction buffer (5×; Agilent Technologies, included with polymerase)
[0818] dNTP solution mix (25 mM each; Enzymatics, cat. no. N205L)
[0819] QIAquick gel extraction kit (Qiagen, cat. no. 28704)
[0820] Taq Buffer (10×; Genscript, cat. no. B0005)
[0821] SURVEYOR mutation detection kit for standard gel electrophoresis (Transgenomic, cat. no. 706025)
[0822] UltraPure TBE buffer (10×; Life Technologies, cat. no. 15581-028)
[0823] SeaKem LE agarose (Lonza, cat. no. 50004)
[0824] 4-20% TBE Gels 1.0 mm, 15 Well (Life Technologies, cat. no. EC62255BOX)
[0825] Novex® Hi-Density TBE Sample Buffer (5×; Life Technologies, cat. no. LC6678)
[0826] SYBR Gold Nucleic Acid Gel Stain (10,000×; Life Technologies, cat. no. S-11494)
[0827] 1-kb Plus DNA ladder (Life Technologies, cat. no. 10787-018)
[0828] TrackIt CyanOrange loading buffer (Life Technologies, cat. no. 10482-028)
[0829] FastDigest HindIII (Fermentas/ThermoScientific, cat. no. FD0504)

### Equipment

[0830] Filtered sterile pipette tips (Corning)
[0831] Standard 1.5 ml microcentrifuge tubes (Eppendorf, cat. no. 0030 125.150)
[0832] Axygen 96-well PCR plates (VWR, cat. no. PCR-96M2-HSC)
[0833] Axygen 8-Strip PCR tubes (Fischer Scientific, cat. no. 14-222-250)
[0834] Falcon tubes, polypropylene, 15 ml (BD Falcon, cat. no. 352097)
[0835] Falcon tubes, polypropylene, 50 ml (BD Falcon, cat. no. 352070)
[0836] Round-bottom Tube with cell strainer cap, 5 ml (BD Falcon, cat. no. 352235)
[0837] Petri dishes (60 mm×15 mm; BD Biosciences, cat. no. 351007)
[0838] Tissue culture plate (24 well; BD Falcon, cat. no. 353047)
[0839] Tissue culture plate (96 well, flat bottom, BD Falcon, cat. no. 353075)
[0840] Tissue culture dish (100 mm; BD Falcon, 353003)
[0841] 96-well thermocycler with programmable temperature stepping functionality (Applied Biosystems Veriti, cat. no. 4375786).
[0842] Desktop microcentrifuges 5424, 5804 (Eppendorf)
[0843] Gel electrophoresis system (PowerPac basic power supply, Bio-Rad, cat. no. 164-5050, and Sub-Cell GT System gel tray, Bio-Rad, cat. no. 170-4401)
[0844] Novex XCell SureLock Mini-Cell (Life Technologies, cat. no. EI0001)
[0845] Digital gel imaging system (GelDoc EZ, Bio-Rad, cat. no. 170-8270, and blue sample tray, Bio-Rad, cat. no. 170-8273)
[0846] Blue light transilluminator and orange filter goggles (SafeImager 2.0; Invitrogen, cat. no. G6600)
[0847] Gel quantification software (Bio-Rad, ImageLab, included with GelDoc EZ, or open-source ImageJ from the National Institutes of Health, available at the website rsbweb.nih.gov/ij/) UV spectrophotometer (NanoDrop 2000c, Thermo Scientific)

### Reagent Setup

[0848] Tris-borate EDTA (TBE) electrophoresis solution Dilute TBE buffer in distilled water to 1× working solution for casting agarose gels and for use as a buffer for gel electrophoresis. Buffer may be stored at room temperature (18-22° C.) for at least 1 year.
[0849] ATP, 10 mM Divide 10 mM ATP into 50-μl aliquots and store at −20° C. for up to 1 year; avoid repeated freeze-thaw cycles.
[0850] DTT, 10 mM Prepare 10 mM DTT solution in distilled water and store in 20-μl aliquots at −70° C. for up to 2 years; for each reaction, use a new aliquot, as DTT is easily oxidized.
[0851] D10 culture medium For culture of HEK293FT cells, prepare D10 culture medium by supplementing DMEM with 1× GlutaMAX and 10% (vol/vol) fetal bovine serum. As indicated in the protocol, this medium can also be supplemented with 1× penicillin-streptomycin. D10 medium can be made in advance and stored at 4° C. for up to 1 month.
[0852] mTeSR1 culture medium For culture of human embryonic stem cells, prepare mTeSR1 medium by supplementing the 5× supplement (included with mTeSR1 basal medium), and 100 ug/ml Normocin.

### Procedure

### Design of Targeting Components and Use of the Online Tool⋅Timing 1 d

[0853] 1| Input target genomic DNA sequence. Applicants provide an online Cas9 targeting design tool that takes an input sequence of interest, identifies and ranks suitable target sites, and computationally predicts off-target sites for each intended target. Alternatively, one can manually select guide sequence by identifying the 20-bp sequence directly upstream of any 5′-NGG.

[0854] 2| Order necessary oligos and primers as specified by the online tool. If the site is chosen manually, the oligos and primers should be designed.

Preparation of sgRNA Expression Construct

[0855] 3| To generate the sgRNA expression construct, either the PCR- or plasmid-based protocol can be used.
[0856] (A) via PCR amplification⋅Timing 2 h
   [0857] (i) Applicants prepare diluted U6 PCR template. Applicants recommend using PX330 as a PCR template, but any U6-containing plasmid may likewise be used as the PCR template. Applicants diluted template with ddH₂O to a concentration of 10 ng/ul. Note that if a plasmid or cassette already containing an U6-driven sgRNA is used as a template, a gel extraction needs to be performed to ensure that the product contains only the intended sgRNA and no trace sgRNA carryover from template.
   [0858] (ii) Applicants prepared diluted PCR oligos. U6-Fwd and U6-sgRNA-Rev primers are diluted to a final concentration of 10 uM in ddH₂O (add 10 μl of 100 uM primer to 90 μl ddH₂O).
   [0859] (iii) U6-sgRNA PCR reaction. Applicants set up the following reaction for each U6-sgRNA-Rev primer and mastermix as needed:

| Component: | Amount (ul) | Final concentration | |
|---|---|---|---|
| Herculase II PCR buffer, 5X | 10 | 1X | |
| dNTP, 100 mM (25 mM each) | 0.5 | 1 | mM |
| U6 template (PX330) | 1 | 0.2 | ng/ul |
| U6-Fwd primer | 1 | 0.2 | uM |
| U6-sgRNA-Rev primer (variable) | 1 | 0.2 | uM |
| Herculase II Fusion polymerase | 0.5 | | |
| Distilled water | 36 | | |
| Total | 50 | | |

[0860] (iv) Applicants performed PCR reaction on the reactions from step (iii) using the following cycling conditions:

| Cycle number | Denature | Anneal | Extend |
|---|---|---|---|
| 1 | 95° C., 2 m | | |
| 2-31 | 95° C., 20 s | 60° C., 20 s | 72° C., 20 s |
| 32 | | | 72° C., 3 m |

[0861] (v) After the reaction is completed, Applicants ran the product on a gel to verify successful, single-band amplification. Cast a 2% (wt/vol) agarose gel in 1×TBE buffer with 1×SYBR Safe dye. Run 5 μl of the PCR product in the gel at 15 V cm-1 for 20-30 min. Successful amplicons should yield one single 370-bp product and the template should be invisible. It should not be necessary to gel extract the PCR amplicon.
[0862] (vi) Applicants purified the PCR product using the QIAquick PCR purification kit according to the manufacturer's directions. Elute the DNA in 35 μl of Buffer EB or water. Purified PCR products may be stored at 4° C. or −20° C.
[0863] (B) Cloning sgRNA into Cas9-containing bicistronic expression vector⋅Timing 3 d
   [0864] (i) Prepare the sgRNA oligo inserts. Applicants resuspended the top and bottom strands of oligos for each sgRNA design to a final concentration of 100 uM. Phosphorylate and anneal the oligo as follows:

| | |
|---|---|
| Oligo 1 (100 uM) | 1 ul |
| Oligo 2 (100 uM) | 1 ul |
| T4 Ligation Buffer, 10X | 1 ul |
| T4 PNK | 1 ul |
| ddH₂O | 6 ul |
| Total | 10 ul |

[0865] (ii) Anneal in a thermocycler using the following parameters:
[0866] 37° C. for 30 m
[0867] 95° C. for 5 m
[0868] Ramp down to 25° C. at 5° C. per m
[0869] (iii) Applicants diluted phosphorylated and annealed oligos 1:200 by add 1 ul of oligo to 199 μl room temperature ddH₂O.
[0870] (iv) Clone sgRNA oligo into PX330. Applicants set up Golden Gate reaction for each sgRNA. Applicants recommend also setting up a no-insert, PX330 only negative control.

| PX330 (100 ng) | x | ul |
|---|---|---|
| Diluted oligo duplex from step (iii) | 2 | ul |
| Tango Buffer, 10X | 2 | ul |
| DTT, 10 mM | 1 | ul |
| ATP, 10 mM | 1 | ul |
| FastDigest BbsI | 1 | ul |
| T7 Ligase | 0.5 | ul |
| ddH₂O | x | ul |
| Total | 20 | ul |

[0871] (v) Incubate the Golden Gate reaction for a total of 1 h:

| Cycle number | Condition |
|---|---|
| 1-6 | 37° C. for 5 m, 21° C. for 5 m |

[0872] (vi) Applicants treated Golden Gate reaction with PlasmidSafe exonuclease to digest any residual linearized DNA. This step is optional but highly recommended.

| | | |
|---|---|---|
| Golden Gate reaction from step 4 | 11 | ul |
| 10X PlasmidSafe Buffer | 1.5 | ul |
| ATP, 10 mM | 1.5 | ul |
| PlasmidSafe exonuclease | 1 | ul |
| Total | 15 | ul |

[0873] (vii) Applicants incubated the PlasmidSafe reaction at 37° C. for 30 min, followed by inactivation at 70° C. for 30 min. Pause point: after completion, the reaction may be frozen and continued later. The circular DNA should be stable for at least 1 week.
[0874] (viii) Transformation. Applicants transformed the PlasmidSafe-treated plasmid into a competent E. coli strain, according to the protocol supplied with the cells. Applicants recommend Stbl3 for quick transformation. Briefly, Applicants added 5 μl of the product from step
[0875] (vii) into 20 μl of ice-cold chemically competent Stbl3 cells. This is then incubated on ice for 10 m, heat shocked at 42° C. for 30 s, returned immediately to ice for 2 m, 100 μl of SOC medium is added, and this is plated onto an LB plate containing 100 ug/ml ampicillin with incubation overnight at 37° C.
[0876] (ix) Day 2: Applicants inspected plates for colony growth. Typically, there are no colonies on the negative control plates (ligation of BbsI-digested PX330 only, no annealed sgRNA oligo), and tens to hundreds of colonies on the PX330-sgRNA cloning plates.
[0877] (x) From each plate, Applicants picked 2-3 colonies to check correct insertion of sgRNA. Applicants used a sterile pipette tip to inoculate a single colony into a 3 ml culture of LB medium with 100 ug/ml ampicillin. Incubate and shake at 37° C. overnight.
[0878] (xi) Day 3: Applicants isolated plasmid DNA from overnight cultures using a QiAprep Spin miniprep kit according to the manufacturer's instructions.
[0879] (xii) Sequence validate CRISPR plasmid. Applicants verified the sequence of each colony by sequencing from the U6 promoter using the U6-Fwd primer. Optional: sequence the Cas9 gene using primers listed in the following Primer table.

TABLE 14

| Primer | Sequence (5′ to 3′) | SEQ ID NO: | Purpose |
|---|---|---|---|
| U6-For | GAGGGCCTATTTCCCATGATTCC | 1539 | Amplify |
| | | | U6-sgRNA |
| U6-Rev | AAAAAAAGCACCGACTCGGTGCCACTTTTTC | 1540 | Amplify |
| | AAGTTGATAACGGACTAGCCTTATTTTAACTT | | U6-sgRNA; |
| | GCTATTTCTAG | | Nis reverse |
| | CTCTAAAACNNNNNNNNNNNNNNNNNNNCC | | complement |
| | GGTGTTTCGTCCTTTCCACAAG | | of target |
| sgRNA- | CACCGNNNNNNNNNNNNNNNNNNN | 1541 | Clone |
| top | | | sgRNA into |
| | | | PX330 |
| sgRNA- | AAACNNNNNNNNNNNNNNNNNNNC | 1542 | Clone |
| bottom | | | sgRNA into |
| | | | PX330 |
| U6- | AAAAAAAGCACCGACTCGGTGCCACTTTTTC | 1543 | Amplify |
| EMX1- | AAGTTGATAACGGACTAGCCTTATTTTAACT | | U6-EMX1 |
| Rev | TGCTATTTCTAG | | sgRNA |
| | CTCTAAAACCCCTAGTCATTGGAGGTGACCG | | |
| | GTGTTTCGTCCTTTCCACAAG | | |
| EMX1- | CACCGTCACCTCCAATGACTAGGG | 1544 | Clone |
| top | | | EMX1 |
| | | | sgRNA into |
| | | | PX330 |
| EMX1- | AAACCCCTAGTCATTGGAGGTGAC | 1545 | Clone |
| bottom | | | EMX1 |
| | | | sgRNA into |
| | | | PX330 |
| SSODN- | CAGAAGAAGAAGGGCTCCCATCACATCAACC | 1546 | EMX1 HDR |
| sense | GGTGGCGCATTGCCACGAAGCAGGCCAATGG | | (sense; |
| | GGAGGACATC | | insertion |
| | GATGTCACCTCCAATGACAAGCTTGCTAGCG | | underlined) |
| | GTGGGCAACCACAAACCCACGAGGGCAGAG | | |
| | TGCTGCTTGCTG | | |
| | CTGGCCAGGCCCCTGCGTGGGCCCAAGCTGG | | |
| | ACTCTGGCCACTCCCT | | |
| SSODN- | AGGGAGTGGCCAGAGTCCAGCTTGGGCCCAC | 1547 | EMX1 HDR |
| antisense | GCAGGGGCCTGGCCAGCAGCAAGCAGCACT | | (antisense; |
| | CTGCCCTCGTG | | insertion |
| | GGTTTGTGGTTGCCCACCGCTAGCAAGCTTG | | underlined) |
| | TCATTGGAGGTGACATCGATGTCCTCCCCAT | | |
| | TGGCCTGCTTCG | | |
| | TGGCAATGCGCCACCGGTTGATGTGATGGGA | | |
| | GCCCTTCTTCTTCTG | | |
| EMX1- | CCATCCCCTTCTGTGAATGT | 1548 | EMX1 |
| SURV-F | | | SURVEYO |
| | | | R assay |
| | | | PCR, |
| | | | sequencing |
| EMX1- | GGAGATTGGAGACACGGAGA | 1549 | EMX1 |
| SURV- | | | SURVEYO |
| R | | | R assay |
| | | | PCR, |
| | | | sequencing |
| EMX1- | GGCTCCCTGGGTTCAAAGTA | 1550 | EMX1 |
| HDR-F | | | RFLP |
| | | | analysis |
| | | | PCR, |
| | | | sequencing |
| EMX1- | AGAGGGGTCTGGATGTCGTAA | 1551 | EMX1 |
| HDR-R | | | RFLP |
| | | | analysis |
| | | | PCR, |
| | | | sequencing |
| pUC19- | CGCCAGGGTTTTCCCAGTCACGAC | 1552 | pUC19 |
| F | | | multiple |
| | | | cloning site |
| | | | F primer, for |
| | | | Sanger |
| | | | sequencing |

[0880] Applicants referenced the sequencing results against the PX330 cloning vector sequence to check that the 20 bp guide sequence was inserted between the U6 promoter and the remainder of the sgRNA scaffold. Details and sequence of the PX330 map in GenBank vector map format (*.gb file) can be found at the website crispr.genome-engineering.org.

(Optional) Design of ssODN Template⋅Timing 3 d Planning Ahead

[0881] 3| Design and order ssODN. Either the sense or antisense ssODN can be purchased directly from supplier. Applicants recommend designing homology arms of at least 40 bp on either side and 90 bp for optimal HDR efficiency. In Applicants' experience, antisense oligos have slightly higher modification efficiencies.

[0882] 4| Applicants resuspended and diluted ssODN ultramers to a final concentration of 10 uM. Do not combine or anneal the sense and antisense ssODNs. Store at −20° C.

[0883] 5| Note for HDR applications, Applicants recommend cloning sgRNA into the PX330 plasmid.

Functional Validation of sgRNAs: Cell Culture and Transfections⋅Timing 3-4 d

[0884] The CRISPR-Cas system has been used in a number of mammalian cell lines. Conditions may vary for each cell line. The protocols below details transfection conditions for HEK239FT cells. Note for ssODN-mediated HDR transfections, the Amaxa SF Cell Line Nucleofector Kit is used for optimal delivery of ssODNs. This is described in the next section.

[0885] 7| HEK293FT maintenance. Cells are maintained according to the manufacturer's recommendations. Briefly, Applicants cultured cells in D10 medium (GlutaMax DMEM supplemented with 10% Fetal Bovine Serum), at 37° C. and 5% CO2.

[0886] 8| To passage, Applicants removed medium and rinsed once by gently adding DPBS to side of vessel, so as not to dislodge cells. Applicants added 2 ml of TrypLE to a T75 flask and incubated for 5 m at 37° C. 10 ml of warm D10 medium is added to inactivate and transferred to a 50 ml Falcon tube. Applicants dissociated cells by triturating gently, and re-seeded new flasks as necessary. Applicants typically passage cells every 2-3 d at a split ratio of 1:4 or 1:8, never allowing cells to reach more than 70% confluency. Cell lines are restarted upon reaching passage number 15.

[0887] 9| Prepare cells for transfection. Applicants plated well-dissociated cells onto 24-well plates in D10 medium without antibiotics 16-24 h before transfection at a seeding density of 1.3 ×10⁵ cells per well and a seeding volume of 500 μl. Scale up or down according to the manufacturer's manual as needed. It is suggested to not plate more cells than recommended density as doing so may reduce transfection efficiency.

[0888] 10| On the day of transfection, cells are optimal at 70-90% confluency. Cells may be transfected with Lipofectamine 2000 or Amaxa SF Cell Line Nucleofector Kit according to the manufacturers' protocols.
[0889] (A) For sgRNAs cloned into PX330, Applicants transfected 500 ng of sequence-verified CRISPR plasmid; if transfecting more than one plasmid, mix at equimolar ratio and no more than 500 ng total.
[0890] (B) For sgRNA amplified by PCR, Applicants mixed the following:

| | |
|---|---|
| PX165 (Cas9 only) | 200 ng |
| sgRNA amplicon (each) | 40 ng |
| pUC19 | fill up total DNA to 500 ng |

[0891] Applicants recommend transfecting in technical triplicates for reliable quantification and including transfection controls (e.g. GFP plasmid) to monitor transfection efficiency. In addition, PX330 cloning plasmid and/or sgRNA amplicon may be transfected alone as a negative control for downstream functional assays.

[0892] 11| Applicants added Lipofectamine complex to cells gently as HEK293FT cells may detach easily from plate easily and result in lower transfection efficiency.

[0893] 12| Applicants checked cells 24 h after transfection for efficiency by estimating the fraction of fluorescent cells in the control (e.g., GFP) transfection using a fluorescence microscope. Typically cells are more than 70% transfected.

[0894] 13| Applicants supplemented the culture medium with an additional 500 μl of warm D10 medium. Add D10 very slowly to the side of the well and do not use cold medium, as cells can detach easily.

[0895] 14| Cells are incubated for a total of 48-72 h post-transfection before harvested for indel analysis. Indel efficiency does not increase noticeably after 48 h.

(Optional) Co-Transfection of CRISPR Plasmids and ssODNs or Targeting Plasmids for HR ⋅Timing 3-4 d

[0896] 15| Linearize targeting plasmid. Targeting vector is linearized if possible by cutting once at a restriction site in the vector backbone near one of the homology arms or at the distal end of either homology arm.

[0897] 16| Applicants ran a small amount of the linearized plasmid alongside uncut plasmid on a 0.8-1% agarose gel to check successful linearization. Linearized plasmid should run above the supercoiled plasmid.

[0898] 17| Applicants purified linearized plasmid with the QIAQuick PCR Purification kit.

[0899] 18| Prepare cells for transfection. Applicants cultured HEK293FT in T75 or T225 flasks. Sufficient cell count before day of transfection is planned for. For the Amaxa strip-cuvette format, 2×10⁶ cells are used per transfection.

[0900] 19| Prepare plates for transfection. Applicants added 1 ml of warm D10 medium into each well of a 12 well plate. Plates are placed into the incubator to keep medium warm.

[0901] 20| Nucleofection. Applicants transfected HEK293FT cells according to the Amaxa SF Cell Line Nucleofector 4D Kit manufacturer's instructions, adapted in the steps below.
[0902] a. For ssODN and CRISPR cotransfection, pre-mix the following DNA in PCR tubes:

| | |
|---|---|
| pCRISPR plasmid (Cas9 + sgRNA) | 500 ng |
| ssODN template (10 uM) | 1 ul |

[0903] b. For HDR targeting plasmid and CRISPR cotransfection, pre-mix the following DNA in PCR tubes:

| | |
|---|---|
| CRISPR plasmid (Cas9 + sgRNA) | 500 ng |
| Linearized targeting plasmid | 500 ng |

[0904] For transfection controls, see previous section. In addition, Applicants recommend transfecting ssODN or targeting plasmid alone as a negative control.

[0905] 21| Dissociate to single cells. Applicants removed medium and rinsed once gently with DPBS, taking care not to dislodge cells. 2 ml of TrypLE is added to a T75 flask and incubated for 5 m at 37° C. 10 ml of warm D10 medium is added to inactivate and triturated gently in a 50 ml Falcon tube. It is recommended that cells are triturated gently and dissociated to single cells. Large clumps will reduce transfection efficiency. Applicants took a 10 μl aliquot from the suspension and diluted into 90 μl of D10 medium for counting. Applicants counted cells and calculated the number of cells and volume of suspension needed for transfection. Applicants typically transfected 2×10⁵ cells per condition using the Amaxa Nucleocuvette strips, and recommend calculating for 20% more cells than required to adjust for volume loss in subsequent pipetting steps. The volume needed is transferred into a new Falcon tube.

[0906] 23| Applicants spun down the new tube at 200×g for 5 m.

[0907] Applicants prepared the transfection solution by mixing the SF solution and S1 supplement as recommended by Amaxa. For Amaxa strip-cuvettes, a total of 20 μl of supplemented SF solution is needed per transfection. Likewise, Applicants recommend calculating for 20% more volume than required.

[0908] 25| Applicants removed medium completely from pelleted cells from step 23 and gently resuspended in appropriate volume (20 μl per 2×10⁵ cells) of S1-supplemented SF solution. Do not leave cells in SF solution for extended period of time.

[0909] 26| 20 ul of resuspended cells is pipetted into each DNA pre-mix from step 20. Pipette gently to mix and transfer to Nucleocuvette strip chamber. This is repeated for each transfection condition.

### Electroporate Cells Using the Nucleofector 4D Program Recommended by Amaxa, CM-130.

[0910] 28| Applicants gently and slowly pipetted 100 μl of warm D10 medium into each Nucleocuvette strip chamber, and transferred all volume into the pre-warmed plate from step 19. CRITICAL. Cells are very fragile at this stage and harsh pipetting can cause cell death. Incubate for 24 h. At this point, transfection efficiency can be estimated from fraction of fluorescent cells in positive transfection control. Nucleofection typically results in greater than 70-80% transfection efficiency. Applicants slowly added 1 ml warm D10 medium to each well without dislodging the cells. Incubate cells for a total of 72 h.

### Human Embryonic Stem Cell (HUES 9) Culture and Transfection⋅Timing 3-4 d

[0911] Maintaining hESC (HUES9) line. Applicants routinely maintain HUES9 cell line in feeder-free conditions with mTesR1 medium. Applicants prepared mTeSR1 medium by adding the 5× supplement included with basal medium and 100 ug/ml Normocin. Applicants prepared a 10 ml aliquot of mTeSR1 medium supplemented further with 10 uM Rock Inhibitor. Coat tissue culture plate. Dilute cold GelTrex 1:100 in cold DMEM and coat the entire surface of a 100 mm tissue culture plate.

[0912] Place plate in incubator for at least 30 m at 37° C. Thaw out a vial of cells at 37° C. in a 15 ml Falcon tube, add 5 ml of mTeSR1 medium, and pellet at 200×g for 5 m. Aspirate off GelTrex coating and seed ˜1×10⁶ cells with 10 ml mTeSR1 medium containing Rock Inhibitor. Change to normal mTeSR1 medium 24 h after transfection and re-feed daily. Passaging cells. Re-feed cells with fresh mTeSR1 medium daily and passage before reaching 70% confluency. Aspirate off mTeSR1 medium and wash cells once with DPBS. Dissociate cells by adding 2 ml Accutase and incubating at 37° C. for 3-5 m. Add 10 ml mTeSR1 medium to detached cells, transfer to 15 ml Falcon tube and resuspend gently. Re-plate onto GelTrex-coated plates in mTeSR1 medium with 10 uM Rock Inhibitor. Change to normal mTeSR1 medium 24 h after plating.

[0913] Transfection. Applicants recommend culturing cells for at least 1 week post-thaw before transfecting using the Amaxa P3 Primary Cell 4-D Nucleofector Kit (Lonza). Re-feed log-phase growing cells with fresh medium 2 h before transfection. Dissociate to single cells or small clusters of no more than 10 cells with accutase and gentle resuspension. Count the number of cells needed for nucleofection and spin down at 200×g for 5 m. Remove medium completely and resuspend in recommended volume of S1-supplemented P3 nucleofection solution. Gently plate electroporated cells into coated plates in presence of 1× Rock Inhibitor.

[0914] Check transfection success and re-feed daily with regular mTeSR1 medium beginning 24 h after nucleofection. Typically, Applicants observe greater than 70% transfection efficiency with Amaxa Nucleofection. Harvest DNA. 48-72 h post transfection, dissociate cells using accutase and inactivate by adding 5×volume of mTeSR1. Spin cells down at 200×g for 5 m. Pelleted cells can be directed processed for DNA extraction with QuickExtract solution. It is recommended to not mechanically dissociate cells without accutase. It is recommended to not spin cells down without inactivating accutase or above the recommended speed; doing so may cause cells to lyse.

### Isolation of Clonal Cell Lines by FACS. Timing. 2-3 h Hands-on; 2-3 Weeks Expansion

[0915] Clonal isolation may be performed 24 h post-transfection by FACS or by serial dilution.

[0916] 54| Prepare FACS buffer. Cells that do not need sorting using colored fluorescence may be sorted in regular D10 medium supplemented with 1× penicillin/streptinomycin. If colored fluorescence sorting is also required, a phenol-free DMEM or DPBS is substituted for normal DMEM. Supplement with 1× penicillin/streptinomycin and filter through a 0.22 um Steriflip filter.

[0917] 55| Prepare 96 well plates. Applicants added 100 μl of D10 media supplemented with 1× penicillin/streptinomycin per well and prepared the number of plates as needed for the desired number of clones.

[0918] 56| Prepare cells for FACS. Applicants dissociated cells by aspirating the medium completely and adding 100 μl TrypLE per well of a 24-well plate. Incubate for 5 m and add 400 μl warm D10 media.

[0919] 57| Resuspended cells are transferred into a 15 ml Falcon tube and gently triturated 20 times. Recommended to check under the microscope to ensure dissociation to single cells.

[0920] 58| Spin down cells at 200×g for 5 minutes.

[0921] 59| Applicants aspirated the media, and resuspended the cells in 200 μl of FACS media.

[0922] 60| Cells are filtered through a 35 um mesh filter into labeled FACS tubes. Applicants recommend using the BD Falcon 12×75 mm Tube with Cell Strainer cap. Place cells on ice until sorting.

[0923] 61| Applicants sorted single cells into 96-well plates prepared from step 55. Applicants recommend that in one single designated well on each plate, sort 100 cells as a positive control.

[0924] NOTE. The remainder of the cells may be kept and used for genotyping at the population level to gauge overall modification efficiency.

[0925] 62| Applicants returned cells into the incubator and allowed them to expand for 2-3 weeks. 100 μl of warm D10 medium is added 5 d post sorting. Change 100 μl of medium every 3-5 d as necessary.

[0926] 63| Colonies are inspected for “clonal” appearance 1 week post sorting: rounded colonies radiating from a central point. Mark off wells that are empty or may have been seeded with doublets or multiplets.

[0927] 64| When cells are more than 60% confluent, Applicants prepared a set of replica plates for passaging. 100 μl of D10 medium is added to each well in the replica plates. Applicants dissociated cells directly by pipetting up and down vigorously 20 times. 20% of the resuspended volume was plated into the prepared replica plates to keep the clonal lines. Change the medium every 2-3 d thereafter and passage accordingly.

[0928] 65| Use the remainder 80% of cells for DNA isolation and genotyping.

Optional: Isolation of Clonal Cell Lines by Dilution. Timing. 2-3 h Hands-on; 2-3 Weeks Expansion

[0929] 66| Applicants dissociated cells from 24-well plates as described above. Make sure to dissociate to single cells. A cell strainer can be used to prevent clumping of cells.

[0930] 67| The number of cells are counted in each condition. Serially dilute each condition in D10 medium to a final concentration of 0.5 cells per 100 μl. For each 96 well plate, Applicants recommend diluting to a final count of 60 cells in 12 ml of D10. Accurate count of cell number is recommended for appropriate clonal dilution. Cells may be recounted at an intermediate serial dilution stage to ensure accuracy.

[0931] 68| Multichannel pipette was used to pipette 100 μl of diluted cells to each well of a 96 well plate.

[0932] NOTE. The remainder of the cells may be kept and used for genotyping at the population level to gauge overall modification efficiency.

[0933] 69| Applicants inspected colonies for “clonal” appearance ˜1 week post plating: rounded colonies radiating from a central point. Mark off wells that may have seeded with doublets or multiplets.

[0934] 70| Applicants returned cells to the incubator and allowed them to expand for 2-3 weeks. Re-feed cells as needed as detailed in previous section.

SURVEYOR Assay for CRISPR Cleavage Efficiency. Timing⋅5-6 h

[0935] Before assaying cleavage efficiency of transfected cells, Applicants recommend testing each new SURVEYOR primer on negative (untransfected) control samples through the step of SURVEYOR nuclease digestion using the protocol described below. Occasionally, even single-band clean SURVEYOR PCR products can yield non-specific SURVEYOR nuclease cleavage bands and potentially interfere with accurate indel analysis.

[0936] 71| Harvest cells for DNA. Dissociate cells and spin down at 200×g for 5 m. NOTE. Replica plate at this stage as needed to keep transfected cell lines.

[0937] 72| Aspirate the supernatant completely.

[0938] 73| Applicants used QuickExtract DNA extraction solution according to the manufacturer's instructions. Applicants typically used 50 μl of the solution for each well of a 24 well plate and 10 μl for a 96 well plate.

[0939] 74| Applicants normalized extracted DNA to a final concentration of 100-200 ng/ul with ddH2O. Pause point: Extracted DNA may be stored at −20° C. for several months.

[0940] 75| Set up the SURVEYOR PCR. Master mix the following using SURVEYOR primers provided by Applicants online/computer algorithm tool:

TABLE 15

| Component: | Amount (ul) | Final concentration | |
|---|---|---|---|
| Herculase II PCR buffer, 5X | 10 | 1X | |
| dNTP, 100 mM (25 mM each) | 1 | 1 | mM |
| SURVEYOR Fwd primer (10 uM) | 1 | 0.2 | uM |
| SURVEYOR Rev primer (10 uM) | 1 | 0.2 | uM |
| Herculase II Fusion polymerase | 1 | | |
| MgCl₂ (25 mM) | 2 | 1 | mM |

| | |
|---|---|
| Distilled water | 33 |
| Total | 49 (for each reaction) |

[0941] 76| Applicants added 100-200 ng of normalized genomic DNA template from step 74 for each reaction.

[0942] 77| PCR reaction was performed using the following cycling conditions, for no more than 30 amplification cycles:

TABLE 16

| Cycle number | Denature | Anneal | Extend |
|---|---|---|---|
| 1 | 95° C., 2 min | | |
| 2-31 | 95° C., 20 s | 60° C., 20 s | 72° C., 30 s |
| 32 | | 72° C., 3 min | |

[0943] 78| Applicants ran 2-5 μl of PCR product on a 1% gel to check for single-band product. Although these PCR conditions are designed to work with most pairs of SURVEYOR primers, some primers may need additional optimization by adjusting the template concentration, MgCl₂ concentration, and/or the annealing temperature.

[0944] 79| Applicants purified the PCR reactions using the QIAQuick PCR purification kit and normalized eluant to 20 ng/ul. Pause point: Purified PCR product may be stored at −20° C.

[0945] 80| DNA heteroduplex formation. The annealing reaction was set up as follows:

TABLE 17

| | |
|---|---|
| Taq PCR buffer, 10X | 2 ul |
| Normalized DNA (20 ng/ul) | 18 ul |
| Total volume | 20 ul |

[0946] 81| Anneal the reaction using the following conditions:

TABLE 18

| Cycle number | Condition |
|---|---|
| 1 | 95° C., 10 mn |
| 2 | 95° C.-85° C., −2° C./s |
| 3 | 85° C., 1 min |
| 4 | 85° C.-75° C., −0.3° C./s |
| 5 | 75° C., 1 min |
| 6 | 75° C.-65° C., −0.3° C./s |
| 7 | 65° C., 1 min |
| 8 | 65° C.-55° C., −0.3° C./s |
| 9 | 55° C., 1 min |
| 10 | 55° C.-45° C., −0.3° C./s |
| 11 | 45° C., 1 min |
| 12 | 45° C.-35° C., −0.3° C./s |
| 13 | 35° C., 1 min |
| 14 | 35° C.-25° C., −0.3° C./s |
| 15 | 25° C., 1 min |

[0947] 82| SURVEYOR nuclease S digestion. Applicants prepared master-mix and added the following components on ice to annealed heteroduplexes from step 81 for a total final volume of 25 ul:

TABLE 19

| Component | Amount (ul) | Final Concentration |
|---|---|---|
| MgCl₂ solution, 0.15M | 2.5 | 15 mM |
| ddH₂O | 0.5 | |
| SURVEYOR nuclease S | 1 | 1X |
| SURVEYOR enhancer S | 1 | 1X |
| Total | 5 | |

[0948] 83| Vortex well and spin down. Incubate the reaction at 42° C. for 1 h.

[0949] 84| Optional: 2 μl of the Stop Solution from the SURVEYOR kit may be added. Pause point. The digested product may be stored at −20° C. for analysis at a later time.

[0950] 85| Visualize the SURVEYOR reaction. SURVEYOR nuclease digestion products may be visualized on a 2% agarose gel. For better resolution, products may be run on a 4-20% gradient Polyacrylamide TBE gel. Applicants loaded 10 μl of product with the recommended loading buffer and ran the gel according to manufacturer's instructions. Typically, Applicants run until the bromophenol blue dye has migrated to the bottom of the gel. Include DNA ladder and negative controls on the same gel.

[0951] 86| Applicants stained the gel with 1×SYBR Gold dye diluted in TBE. The gel was gently rocked for 15 m.

[0952] 87| Applicants imaged the gel using a quantitative imaging system without overexposing the bands. The negative controls should have only one band corresponding to the size of the PCR product, but may have occasionally non-specific cleavage bands of other sizes. These will not interfere with analysis if they are different in size from target cleavage bands. The sum of target cleavage band sizes, provided by Applicants online/computer algorithm tool, should be equal to the size of the PCR product.

[0953] 88| Estimate the cleavage intensity. Applicants quantified the integrated intensity of each band using ImageJ or other gel quantification software.

[0954] 89| For each lane, Applicants calculated the fraction of the PCR product cleaved (f_{cut}) using the following formula: f_{cut}=(b+c)/(a +b+c), where a is the integrated intensity of the undigested PCR product and b and c are the integrated intensities of each cleavage product. 90| Cleavage efficiency may be estimated using the following formula, based on the binomial probability distribution of duplex formation:

$$indel ( \% ) = 100 \times ( 1 - \sqrt{( 1 - {f}_{cut} )} ) \vert IPSpecs\_L1 \vert ZZMPTAG \vert$$

Sanger Sequencing for Assessing CRISPR Cleavage Efficiency. Timing⋅3 d

[0955] Initial steps are identical to Steps 71-79 of the SURVEYOR assay. Note: SURVEYOR primers may be used for Sanger sequencing if appropriate restriction sites are appended to the Forward and Reverse primers. For cloning into the recommended pUC19 backbone, EcoRI may be used for the Fwd primer and HindIII for the Rev primer.

[0956] 92| Amplicon digestion. Set up the digestion reaction as follows:

TABLE 20

| Component | Amount (ul) |
|---|---|
| Fast Digest buffer, 10X | 3 |
| FastDigest EcoRI | 1 |
| FastDigest HindIII | 1 |
| Normalized DNA (20 ng/ul) | 10 |
| ddH₂O | 15 |
| Total volume | 30 |

[0957] 93| pUC19 backbone digestion. Set up the digestion reaction as follows:

TABLE 21

| Component | Amount (ul) |
|---|---|
| Fast Digest buffer, 10X | 3 |
| FastDigest EcoRI | 1 |
| FastDigest HindIII | 1 |
| FastAP Alkaline Phosphatase | 1 |
| pUC19 vector (200 ng/ul) | 5 |
| ddH₂O | 20 |
| Total volume | 30 |

[0958] 94| Applicants purified the digestion reactions using the QIAQuick PCR purification kit. Pause point: Purified PCR product may be stored at −20° C.

[0959] 95| Applicants ligated the digested pUC19 backbone and Sanger amplicons at a 1:3 vector: insert ratio as follows:

TABLE 22

| Component | Amount (ul) |
|---|---|
| Digested pUC19 | x (50 ng) |
| Digested insert | x (1:3 vector:insert molar ratio) |
| T7 ligase | 1 |
| 2X Rapid Ligation Buffer | 10 |
| ddH₂O | x |
| Total volume | 20 |

[0960] 96| Transformation. Applicants transformed the PlasmidSafe-treated plasmid into a competent E. coli strain, according to the protocol supplied with the cells. Applicants recommend Stbl3 for quick transformation. Briefly, 5 μl of the product from step 95 is added into 20 μl of ice-cold chemically competent Stbl3 cells, incubated on ice for 10 m, heat shocked at 42° C. for 30 s, returned immediately to ice for 2 m, 100 μl of SOC medium is added, and plated onto an LB plate containing 100 ug/ml ampicillin. This is incubated overnight at 37° C.

[0961] 97| Day 2: Applicants inspected plates for colony growth. Typically, there are no colonies on the negative control plates (ligation of EcoRI-HindIII digested pUC19 only, no Sanger amplicon insert), and tens to hundreds of colonies on the pUC19-Sanger amplicon cloning plates.

[0962] 98| Day 3: Applicants isolated plasmid DNA from overnight cultures using a QIAprep Spin miniprep kit according to the manufacturer's instructions.

[0963] 99| Sanger sequencing. Applicants verified the sequence of each colony by sequencing from the pUC19 backbone using the pUC19-For primer. Applicants referenced the sequencing results against the expected genomic DNA sequence to check for the presence of Cas9-induced NHEJ mutations. % editing efficiency=(#modified clones)/(#total clones). It is important to pick a reasonable number of clones (>24) to generate accurate modification efficiencies.

Genotyping for Microdeletion. Timing⋅2-3 d Hands on; 2-3 Weeks Expansion

[0964] 100| Cells were transfected as described above with a pair of sgRNAs targeting the region to be deleted.

[0965] 101| 24 h post-transfection, clonal lines are isolated by FACS or serial dilution as described above.

[0966] 102| Cells are expanded for 2-3 weeks.

[0967] 103| Applicants harvested DNA from clonal lines as described above using 10 μl QuickExtract solution and normalized genomic DNA with ddH₂O to a final concentration of 50-100 ng/ul.

[0968] 104| PCR Amplify the modified region. The PCR reaction is set up as follows:

TABLE 23

| | | Final | |
|---|---|---|---|
| Component: | Amount (ul) | concentration | |
| Herculase II PCR buffer, 5X | 10 | 1X | |
| dNTP, 100 mM (25 mM each) | 1 | 1 | mM |
| Out Fwd primer (10 uM) | 1 | 0.2 | uM |
| Out Rev primer (10 uM) | 1 | 0.2 | uM |
| Herculase II Fusion polymerase | 1 | | |
| MgCl2 (25 mM) | 2 | 1 | mM |

| | |
|---|---|
| ddH₂O | 32 |
| Total | 48 (for each reaction) |

[0969] Note: if deletion size is more than 1 kb, set up a parallel set of PCR reactions with In-Fwd and In-Rev primers to screen for the presence of the wt allele.

TABLE 24

| | | Final | |
|---|---|---|---|
| Component: | Amount (ul) | concentration | |
| Herculase II PCR buffer, 5X | 10 | 1X | |
| dNTP, 100 mM (25 mM each) | 1 | 1 | mM |
| Out Fwd or Out-Rev primer | 1 | 0.2 | uM |
| (10 uM) | | | |
| In Fwd or In-Rev primer | 1 | 0.2 | uM |
| (10 uM) | | | |
| Herculase II Fusion polymerase | 1 | | |
| MgCl₂ (25 mM) | 2 | 1 | mM |

| | |
|---|---|
| ddH₂O | 32 |
| Total | 48 (for each reaction) |

[0970] 105| To screen for inversions, a PCR reaction is set up as follows:

[0971] Note: primers are paired either as Out-Fwd+In Fwd, or Out-Rev+In-Rev.

[0972] 106| Applicants added 100-200 ng of normalized genomic DNA template from step 103 for each reaction.

TABLE 25

| Cycle number | Denature | Anneal | Extend |
|---|---|---|---|
| 1 | 95° C., 2 min | | |
| 2-31 | 95° C., 20 s | 60° C., 20 s | 72° C., 30 s |
| 32 | 72° C., 3 m | | |

[0973] 107| PCR reaction was performed using the following cycling conunvino.

[0974] 108| Applicants run 2-5 μl of PCR product on a 1-2% gel to check for product. Although these PCR conditions are designed to work with most primers, some primers may need additional optimization by adjusting the template concentration, MgCl₂ concentration, and/or the annealing temperature.

### Genotyping for Targeted Modifications Via HDR. Timing⋅2-3 d, 2-3 h Hands on

[0975] 109| Applicants harvested DNA as described above using QuickExtract solution and normalized genomic DNA with TE to a final concentration of 100-200 ng/ul.

[0976] 110| PCR Amplify the modified region. The PCR reaction is set up as follows:

TABLE 26

| | | Final | |
|---|---|---|---|
| Component: | Amount (ul) | concentration | |
| Herculase II PCR buffer, 5X | 10 | 1X | |
| dNTP, 100 mM (25 mM each) | 1 | 1 | mM |
| HDR Fwd primer (10 uM) | 1 | 0.2 | uM |
| HDR Rev primer (10 uM) | 1 | 0.2 | uM |
| Herculase II Fusion polymerase | 1 | | |
| MgCl₂ (25 mM) | 2 | 1 | mM |

| | |
|---|---|
| ddH₂O | 33 |
| Total | 49 (for each reaction) |

[0977] 111| Applicants added 100-200 ng of genomic DNA template from step 109 for each reaction and run the following program.

TABLE 27

| Cycle number | Denature | Anneal | Extend |
|---|---|---|---|
| 1 | 95° C., 2 min | | |
| 2-31 | 95° C., 20 s | 60° C., 20 s | 72° C., 30-60 s per kb |
| 32 | | 72° C., 3 min | |

[0978] 112| Applicants ran 5 μl of PCR product on a 0.8-1% gel to check for single-band product. Primers may need additional optimization by adjusting the template concentration, MgCl₂ concentration, and/or the annealing temperature.

[0979] 113| Applicants purified the PCR reactions using the QIAQuick PCR purification kit.

[0980] 114| In the HDR example, a HindIII restriction site is inserted into the EMX1 gene. These are detected by a restriction digest of the PCR amplicon:

TABLE 28

| Component | Amount (ul) |
|---|---|
| Purified PCR amplicon (200-300 ng) | x |
| F.D. buffer, Green | 1 |
| HindIII | 0.5 |
| ddH2O | x |
| Total | 10 |

[0981] i. The DNA is digested for 10 m at 37° C.:
[0982] ii. Applicants ran 10 μl of the digested product with loading dye on a 4-20% gradient polyacrylamide TBE gel until the xylene cyanol band had migrated to the bottom of the gel.
[0983] iii. Applicants stained the gel with 1×SYBR Gold dye while rocking for 15 m.
[0984] iv. The cleavage products are imaged and quantified as described above in the SURVEYOR assay section. HDR efficiency is estimated by the formula: (b+c)/(a +b+c), where a is the integrated intensity for the undigested HDR PCR product, and b and c are the integrated intensities for the HindIII-cut fragments.

[0985] 115| Alternatively, purified PCR amplicons from step 113 may be cloned and genotyped using Sanger sequencing or NGS.

### Deep Sequencing and Off-Target Analysis⋅Timing 1-2 d

[0986] The online CRISPR target design tool generates candidate genomic off-target sites for each identified target site. Off-target analysis at these sites can be performed by SURVEYOR nuclease assay, Sanger sequencing, or next-generation deep sequencing. Given the likelihood of low or undetectable modification rates at many of these sites, Applicants recommend deep sequencing with the Illumina Miseq platform for high sensitivity and accuracy. Protocols will vary with sequencing platform; here, Applicants briefly describe a fusion PCR method for attaching sequencing adapters.

[0987] 116| Design deep sequencing primers. Next-generation sequencing (NGS) primers are designed for shorter amplicons, typically in the 100-200 bp size range. Primers may be manually designed using NCBI Primer-Blast or generated with online CRISPR target design tools (website at genome-engineering.org/tools).

[0988] 117| Harvest genomic DNA from Cas9-targeted cells. Normalize QuickExtract genomic DNA to 100-200 ng/ul with ddH2O.

[0989] 118| Initial library preparation PCR. Using the NGS primers from step 116, prepare the initial library preparation PCR Table 29.

| | | Final | |
|---|---|---|---|
| Component: | Amount (ul) | concentration | |
| Herculase II PCR buffer, 5X | 10 | 1X | |
| dNTP, 100 mM (25 mM each) | 1 | 1 | mM |
| NGS Fwd primer (10 uM) | 1 | 0.2 | uM |
| NGS Rev primer (10 uM) | 1 | 0.2 | uM |
| Herculase II Fusion polymerase | 1 | | |
| MgCl2 (25 mM) | 2 | 1 | mM |

| | |
|---|---|
| ddH2O | 33 |
| Total | 49 (for each reaction) |

[0990] 119| Add 100-200 ng of normalized genomic DNA template for each reaction.

[0991] 120| Perform PCR reaction using the following cycling conditions, for no more than 20 amplification cycles:

TABLE 30

| Cycle number | Denature | Anneal | Extend |
|---|---|---|---|
| 1 | 95° C., 2 min | | |
| 2-21 | 95° C., 20 s | 60° C., 20 s | 72° C., 15 s |
| 22 | | 72° C., 3 min | |

[0992] 121| Run 2-5 μl of PCR product on a 1% gel to check for single-band product. As with all genomic DNA PCRs, NGS primers may require additional optimization by adjusting the template concentration, MgCl₂ concentration, and/or the annealing temperature.

[0993] 122| Purify the PCR reactions using the QIAQuick PCR purification kit and normalize eluant to 20 ng/ul. Pause point: Purified PCR product may be stored at −20° C.

[0994] 123| Nextera XT DNA Sample Preparation Kit. Following the manufacturer's protocol, generate Miseq sequencing-ready libraries with unique barcodes for each sample.

[0995] 124| Analyze sequencing data. Off-target analysis may be performed through read alignment programs such as ClustalW, Geneious, or simple sequence analysis scripts.

### Timing

[0996] Steps 1-2 Design and synthesis of sgRNA oligos and ssODNs: 1-5 d, variable depending on supplier
[0997] Steps 3-5 Construction of CRISPR plasmid or PCR expression cassette: 2 h to 3 d Steps 6-53 Transfection into cell lines: 3 d (1 h hands-on time)
[0998] Steps 54-70 Optional derivation of clonal lines: 1-3 weeks, variable depending on cell type
[0999] Steps 71-91 Functional validation of NHEJ via SURVEYOR: 5-6 h
[1000] Steps 92-124 Genotyping via Sanger or next-gen deep sequencing: 2-3 d (3-4 h hands on time) Table 31.

### Addressing Situations Concerning Herein Examples

| Situation | Solution |
|---|---|
| No amplification of | Titrate U6-template concentration |
| sgRNA | |
| SURVEYOR or HDR PCR | Titrate MgCl2; normalize and titrate template |
| dirty or no amplification | concentration; annealing temp gradient; redesign primers |
| Unequal amplification of | Set up separate PCRs to detect wildtype and deletion |
| alleles in microdeletion | alleles; Redesign primers with similar sized amplicons |
| PCRs | |
| Colonies on negative | Increase BbsI; increase Golden Gate reaction cycle |
| control plate | number, cut PX330 separately with Antarctic Phosphate |
| | treatment |
| No sgRNA sequences or | Screen additional colonies |
| wrong sequences | |
| Low lipofectamine | Check cell health and density; titrate DNA; add GFP |
| transfection efficiency | transfection control |
| Low nucleofection | Check cell health and density; titrate DNA; suspend to |
| transfection efficiency | single cell |
| Clumps or no cells after | Filter cells before FACS; dissociate to single cells; |
| FACS | resuspend in appropriate density |
| Clumps or no cells in serial | Recount cells; dissociate to single cells and filter through |
| dilution | strainer; check serial dilution |
| High SURVEYOR | Redesign primers to prime from different locations |
| background on negative | |
| sample | |
| Dirty SURVEYOR result | Purify PCR product; reduce input DNA; reduce 42° C. |
| on gel | incubation to 30 m |
| No SURVEYOR cleavage | Purify and normalize PCR product; re-anneal with TaqB |
| | buffer; Redesign sgRNAs; sequence verify Cas9 on px330 |
| | backbone |
| Samples do not sink in | Supplement with MgCl2 to a final concentration of 15 mM |
| TBE acrylamide gel | or add loading buffer containing glycerol |

### Discussion

[1001] CRISPR-Cas may be easily multiplexed to facilitate simultaneous modification of several genes and mediate chromosomal microdeletions at high efficiencies. Applicants used two sgRNAs to demonstrate simultaneous targeting of the human GRIN2B and DYRKIA loci at efficiencies of up to 68% in HEK293FT cells. Likewise, a pair of sgRNAs may be used to mediate microdeletions, such as excision of an exon, which can be genotyped by PCR on a clonal level. Note that the precise location of exon junctions can vary. Applicants also demonstrated the use of ssODNs and targeting vector to mediate HDR with both wildtype and nickase mutant of Cas9 in HEK 293 FT and HUES9 cells (FIG. 30). Note that Applicants have not been able to detect HDR in HUES9 cells using the Cas9 nickase, which may be due to low efficiency or a potential difference in repair activities in HUES9 cells. Although these values are typical, there is some variability in the cleavage efficiency of a given sgRNA, and on rare occasions certain sgRNAs may not work for reasons yet unknown. Applicants recommend designing two sgRNAs for each locus, and testing their efficiencies in the intended cell type.

### Example 24: NLSs

[1002] Cas9 Transcriptional Modulator: Applicants set out to turn the Cas9/gRNA CRISPR system into a generalized DNA binding system in which functions beyond DNA cleavage can be executed. For instance, by fusing functional domain(s) onto a catalytically inactive Cas9 Applicants have imparted novel functions, such as transcriptional activation/repression, methylation/demethylation, or chromatin modifications. To accomplish this goal Applicants made a catalytically inactive Cas9 mutant by changing two residues essential for nuclease activity, D10 and H840, to alanine. By mutating these two residues the nuclease activity of Cas9 is abolished while maintaining the ability to bind target DNA. The functional domains Applicants decided to focus on to test Applicants' hypothesis are the transcriptional activator VP64 and the transcriptional repressors SID and KRAB.

[1003] Cas9 Nuclear localization: Applicants hypothesized that the most effective Cas9 transcriptional modulator would be strongly localized to the nucleus where it would have its greatest influence on transcription. Moreover, any residual Cas9 in the cytoplasm could have unwanted effects. Applicants determined that wild-type Cas9 does not localize into the nucleus without including multiple nuclear localization signals (NLSs) (although a CRISPR system need not have one or more NLSs but advantageously has at least one or more NLS(s)). Because multiple NLS sequences were required it was reasoned that it is difficult to get Cas9 into the nucleus and any additional domain that is fused to Cas9 could disrupt the nuclear localization. Therefore, Applicants made four Cas9-VP64-GFP fusion constructs with different NLS sequences (pXRP02-pLenti2-EF1a-NLS-hSpCsn1 (10A,840A)-NLS-VP64-EGFP, pXRP04-pLenti2-EF1a-NLS-hSpCsn1 (10A,840A)-NLS-VP64-2A-EGFP-NLS, pXRP06-pLenti2-EF1a-NLS-EGFP-VP64-NLS-hSpCsn1 (10A,840A)-NLS, pXRP08-pLenti2-EF1a-NLS-VP64-NLS-hSpCsn1 (10A,840A)-NLS-VP64-EGFP-NLS). These constructs were cloned into a lenti backbone under the expression of the human EF1a promoter. The WPRE element was also added for more robust protein expression. Each construct was transfected into HEK 293 FT cells using Lipofectame 2000 and imaged 24 hours post-transfection. The best nuclear localization is obtained when the fusion proteins have NLS sequences on both the N- and C-term of the fusion protein. The highest observed nuclear localization occurred in the construct with four NLS elements.

[1004] To more robustly understand the influence of NLS elements on Cas9 Applicants made 16 Cas9-GFP fusions by adding the same alpha importin NLS sequence on either the N- or C-term looking at zero to three tandem repeats. Each construct was transfected into HEK 293 FT cells using Lipofectame 2000 and imaged 24 hours post-transfection. Notably, the number of NLS elements does not directly correlate with the extent of nuclear localization. Adding an NLS on the C-term has a greater influence on nuclear localization than adding on the N-term.

[1005] Cas9 Transcriptional Activator: Applicants functionally tested the Cas9-VP64 protein by targeting the Sox2 locus and quantifying transcriptional activation by RT-qPCR. Eight DNA target sites were chosen to span the promoter of Sox2. Each construct was transfected into HEK 293 FT cells using Lipofectame 2000 and 72 hours post-transfection total RNA was extracted from the cells. 1 ug of RNA was reverse transcribed into cDNA (qScript Supermix) in a 40 ul reaction. 2 ul of reaction product was added into a single 20 ul TaqMan assay qPCR reaction. Each experiment was performed in biological and technical triplicates. No RT control and no template control reactions showed no amplification. Constructs that do not show strong nuclear localization, pXRP02 and pXRP04, result in no activation. For the construct that did show strong nuclear localization, pXRP08, moderate activation was observed. Statistically significant activation was observed in the case of guide RNAs Sox2.4 and Sox2.5.

### Example 25: In Vivo Mouse Data

### Material and Reagents

[1006] Herculase II fusion polymerase (Agilent Technologies, cat. no. 600679)
[1007] 10×NEBuffer 4 (NEB, cat. No. B7004S)
[1008] BsaI HF (NEB, cat. No. R3535S)
[1009] T7 DNA ligase (Enzymatics, cat. no. L602L)
[1010] Fast Digest buffer, 10× (ThermoScientific, cat. No. B64)
[1011] FastDigest NotI (ThermoScientific, cat. No. FD0594)
[1012] FastAP Alkaline Phosphatase (ThermoScientific, cat. No. EF0651)
[1013] Lipofectamine2000 (Life Technologies, cat. No. 11668-019)
[1014] Trypsin (Life Technologies, cat. No. 15400054)
[1015] Forceps #4 (Sigma, cat. No. Z168777-1EA)
[1016] Forceps #5 (Sigma, cat. No. F6521-1EA)
[1017] 10× Hank's Balanced Salt Solution (Sigma, cat. No. H4641-500ML)
[1018] Penicillin/Streptomycin solution (Life Technologies, cat. No. P4333)
[1019] Neurobasal (Life Technologies, cat. No. 21103049)
[1020] B27 Supplement (Life Technologies, cat. No. 17504044)
[1021] L-glutamine (Life Technologies, cat. No. 25030081)
[1022] Glutamate (Sigma, cat. No. RES5063G-A7)
[1023] β-mercaptoethanol (Sigma, cat. No. M6250-100ML)
[1024] HA rabbit antibody (Cell Signaling, cat. No. 3724S)
[1025] LIVE/DEAD® Cell Imaging Kit (Life Technologies, cat. No. R37601)
[1026] 30G World Precision Instrument syringe (World Precision Instruments, cat. No. NANOFIL)
[1027] Stereotaxic apparatus (Kopf Instruments)
[1028] UltraMicroPump3 (World Precision Instruments, cat. No. UMP3-4)
[1029] Sucrose (Sigma, cat. No. S7903)
[1030] Calcium chloride (Sigma, cat. No. C1016)
[1031] Magnesium acetate (Sigma, cat. No. M0631)
[1032] Tris-HCl (Sigma, cat. no T5941)
[1033] EDTA (Sigma, cat. No. E6758)
[1034] NP-40 (Sigma, cat. No. NP40)
[1035] Phenylmethanesulfonyl fluoride (Sigma, cat. No. 78830)
[1036] Magnesium chloride (Sigma, cat. No. M8266)
[1037] Potassium chloride (Sigma, cat. No. P9333)
[1038] β-glycerophosphate (Sigma, cat. No. G9422)
[1039] Glycerol (Sigma, cat. No. G9012)
[1040] Vybrant® DyeCycle™ Ruby Stain (Life technologies, cat. No. S4942)
[1041] FACS Aria Flu-act-cell sorter (Koch Institute of MIT, Cambridge US)
[1042] DNAeasy Blood & Tissue Kit (Qiagen, cat. No. 69504)

### Procedure

Constructing gRNA Multiplexes for Using In Vivo in the Brain

[1043] Applicants designed and PCR amplified single gRNAs targeting mouse TET and DNMT family members (as described herein) Targeting efficiency was assessed in N2a cell line (FIG. 33). To obtain simultaneous modification of several genes in vivo, efficient gRNA was multiplexed in AAV-packaging vector (FIG. 34). To facilitate further analysis of system efficiency applicants added to the system expression cassette consistent of GFP-KASH domain fusion protein under control of human Synapsin I promoter (FIG. 34). This modification allows for further analysis of system efficiency in neuronal population (more detail procedure in section Sorting nuclei and in vivo results).

[1044] All 4 parts of the system were PCR amplified using Herculase II Fusion polymerase using following primers:

1st U6 Fw:
(SEQ ID NO: 1553)
gagggtctcgtccttgcggccgcgctagcgagggcctatttccca
tgattc
1st gRNA Rv:
(SEQ ID NO: 1554)
ctcggtctcggtAAAAAAgcaccgactcggtgccactttttcaag
ttgataacggactagccttattttaacttgctaTTTCtagctcta
aaacNNNNNNNNNNNNNNNNNNNNGGTGTTTCGTCCTTTCCAC
2nd U6 Fw:
(SEQ ID NO: 1555)
gagggtctcTTTaccggtgagggcctatttcccatgattcc
2nd gRNA Rv:
(SEQ ID NO: 1556)
ctcggtctcctcAAAAAAgcaccgactcggtgccactttttcaag
ttgataacggactagc cttattttaacttgctaTTTCtagctct
aaaacNNNNNNNNNNNNNNNNNNNNGGTGTTTCGTCCTTTCCAC
3rd U6 Fw:
(SEQ ID NO: 1557)
gagggtctcTTTgagctcgagggcctatttcccatgattc
3rd gRNA Rv:
(SEQ ID NO: 1558)
ctcggtctcgcgtAAAAAAgcaccgactcggtgccactttttcaa
gttgataacggactag ccttattttaacttgctaTTTCtagctc
taaaacNNNNNNNNNNNNNNNNNNNNGGTGTTTCGTCCTTTCCA
hSyn GFP-kash Fw:
(SEQ ID NO : 1559)
gagggtctcTTacgcgtgtgtctagac
hSyn_GFP-kash Rv:
(SEQ ID NO: 1560)
ctcggtctcAaggaCAGGGAAGGGAGCAGTGGTTCACGCCTGTAA
TCCCAGCAATTTGGGA GGCCAAGGTGGGTAGATCACCTGAGATT
AGGAGTTGC
(NNNNNNNNNNNNNNNNNNNN is a reverse
compliment targeted genomic sequence)

[1045] Applicants used Golden Gate strategy to assemble all parts (1:1 molecular ratio) of the system in a single step reaction:

| | | |
|---|---|---|
| 1^{st} U6_gRNA | 18 | ng |
| 2^{nd} U6_gRNA | 18 | ng |
| 3^{rd} U6_gRNA | 18 | ng |
| Syn_GFP-kash | 100 | ng |
| 10x NEBuffer 4 | 1.0 | μl |
| 10x BSA | 1.0 | μl |
| 10 mM ATP | 1.0 | μl |
| BsaI HF | 0.75 | μl |
| T7 ligase | 0.25 | μl |
| ddH₂O | 10 | μl |

| Cycle number | Condition |
|---|---|
| 1-50 | 37° C. for 5 m, 21° C. for 5 m |

[1046] Golden Gate reaction product was PCR amplified using Herculase II fusion polymerase and following primers:

Fw
(SEQ ID NO: 1561)
5' cctgtccttgcggccgcgctagcgagggcc
Rv
(SEQ ID NO: 1562)
5' cacgcggccgcaaggacagggaagggagcag

[1047] PCR product was cloned into AAV backbone, between ITR sequences using NotI restriction sites:

### PCR Product Digestion:

| | |
|---|---|
| Fast Digest buffer, 10X | 3 μl |
| FastDigest NotI | 1 μl |
| DNA | 1 μg |
| ddH₂O | up to 30 μl |

### AAV Backbone Digestion:

| | |
|---|---|
| Fast Digest buffer, 10X | 3 μl |
| FastDigest NotI | 1 μl |
| FastAP Alkaline Phosphatase | 1 μl |
| AAV backbone | 1 μg |
| ddH₂O | up to 30 μl |

[1048] After 20 min incubation in 37° C. samples were purified using QIAQuick PCR purification kit. Standardized samples were ligated at a 1:3 vector: insert ratio as follows:

| Digested pUC19 | 50 | ng |
|---|---|---|
| Digested insert | 1:3 vector:insert molar ratio | |
| T7 ligase | 1 | μl |
| 2X Rapid Ligation Buffer | 5 | μl |

| | |
|---|---|
| ddH₂O | up to 10 μl |

[1049] After transformation of bacteria with ligation reaction product, applicants confirmed obtained clones with Sanger sequencing.

[1050] Positive DNA clones were tested in N2a cells after co-transfection with Cas9 construct (FIGS. 35 and 36).

### Design of New Cas9 Constructs for AAV Delivery

[1051] AAV delivery system despite its unique features has packing limitation—to successfully deliver expressing cassette in vivo it has to be in size <then 4.7 kb. To decrease the size of SpCas9 expressing cassette and facilitate delivery applicants tested several alteration: different promoters, shorter polyA signal and finally a smaller version of Cas9 from Staphylococcus aureus (SaCas9) (FIGS. 37 and 38). All tested promoters were previously tested and published to be active in neurons, including mouse Mecp2 (Gray et al., 2011), rat Map1b and truncated rat Map1b (Liu and Fischer, 1996). Alternative synthetic polyA sequence was previously shown to be functional as well (Levitt et al., 1989; Gray et al., 2011). All cloned constructs were expressed in N2a cells after transfection with Lipofectamine 2000, and tested with Western blotting method (FIG. 39).

### Testing AAV Multiplex System in Primary Neurons

[1052] To confirm functionality of developed system in neurons, Applicants use primary neuronal cultures in vitro. Mouse cortical neurons was prepared according to the protocol published previously by Banker and Goslin (Banker and Goslin, 1988).

[1053] Neuronal cells are obtained from embryonic day 16. Embryos are extracted from the euthanized pregnant female and decapitated, and the heads are placed in ice-cold HBSS. The brains are then extracted from the skulls with forceps (#4 and #5) and transferred to another change of ice-cold HBSS. Further steps are performed with the aid of a stereoscopic microscope in a Petri dish filled with ice-cold HBSS and #5 forceps. The hemispheres are separated from each other and the brainstem and cleared of meninges. The hippocampi are then very carefully dissected and placed in a 15 ml conical tube filled with ice-cold HBSS. Cortices that remain after hippocampal dissection can be used for further cell isolation using an analogous protocol after removing the brain steam residuals and olfactory bulbs. Isolated hippocampi are washed three times with 10 ml ice-cold HBSS and dissociated by 15 min incubation with trypsin in HBSS (4 ml HBSS with the addition of 10 μl 2.5% trypsin per hippocampus) at 37° C. After trypsinization, the hippocampi are very carefully washed three times to remove any traces of trypsin with HBSS preheated to 37° C. and dissociated in warm HBSS. Applicants usually dissociate cells obtained from 10-12 embryos in 1 ml HBSS using 1 ml pipette tips and dilute dissociated cells up to 4 ml. Cells are plated at a density of 250 cells/mm2 and cultured at 37° C. and 5% CO2 for up to 3 week.

### HBSS

[1054] 435 ml H2O
[1055] 50 ml 10× Hank's Balanced Salt Solution
[1056] 16.5 ml 0.3M HEPES pH 7.3
[1057] 5 ml penicillin-streptomycin solution
[1058] Filter (0.2 μm) and store 4° C.
[1059] Neuron Plating Medium (100 ml)
[1060] 97 ml Neurobasal
[1061] 2 ml B27 Supplement
[1062] 1 ml penicillin-streptomycin solution
[1063] 250 μl glutamine
[1064] 125 μl glutamate

[1065] Neurons are transduced with concentrated AAV1/2 virus or AAV1 virus from filtered medium of HEK293FT cells, between 4-7 days in culture and keep for at least one week in culture after transduction to allow for delivered gene expression.

### AAV-Driven Expression of the System

[1066] Applicants confirmed expression of SpCas9 and SaCas9 in neuronal cultures after AAV delivery using Western blot method (FIG. 42). One week after transduction neurons were collected in NuPage SDS loading buffer with β-mercaptoethanol to denaturate proteins in 95° C. for 5 min. Samples were separated on SDS PAGE gel and transferred on PVDF membrane for WB protein detection. Cas9 proteins were detected with HA antibody.

[1067] Expression of Syn-GFP-kash from gRNA multiplex AAV was confirmed with fluorescent microscopy (FIG. 50).

### Toxicity

[1068] To assess the toxicity of AAV with CRISPR system Applicants tested overall morphology of neurons one week after virus transduction (FIG. 45). Additionally, Applicants tested potential toxicity of designed system with the LIVE/DEAD® Cell Imaging Kit, which allows to distinguish live and dead cells in culture. It is based on the presence of intracellular esterase activity (as determined by the enzymatic conversion of the non-fluorescent calcein AM to the intensely green fluorescent calcein). On the other hand, the red, cell-impermeant component of the Kit enters cells with damaged membranes only and bind to DNA generating fluorescence in dead cells. Both flourophores can be easily visualized in living cells with fluorescent microscopy. AAV-driven expression of Cas9 proteins and multiplex gRNA constructs in the primary cortical neurons was well tolerated and not toxic (FIGS. 43 and 44), what indicates that designed AAV system is suitable for in vivo tests.

### Virus Production

[1069] Concentrated virus was produced according to the methods described in McClure et al., 2011. Supernatant virus production occurred in HEK293FT cells.

### Brain Surgeries

[1070] For viral vector injections 10-15 week old male C57BL/6N mice were anesthetized with a Ketamine/Xylazine cocktail (Ketamine dose of 100 mg/kg and Xylazine dose of 10 mg/kg) by intraperitoneal injection. Intraperitonial administration of Buprenex was used as a pre-emptive analgesic (1 mg/kg). Animals were immobilized in a Kopf stereotaxic apparatus using intra-aural positioning studs and tooth bar to maintain an immobile skull. Using a hand-held drill, a hole (1-2 mm) at −3.0 mm posterior to Bregma and 3.5 mm lateral for injection in the CA1 region of the hippocampus was made. Using 30G World Precision Instrument syringe at a depth of 2.5 mm, the solution of AAV viral particles in a total volume of 1 μl was injected. The injection was monitored by a ‘World Precision Instruments UltraMicroPump3’ injection pump at a flow rate of 0.5 μl/min to prevent tissue damage. When the injection was complete, the injection needle was removed slowly, at a rate of 0.5 mm/min. After injection, the skin was sealed with 6-0 Ethilon sutures. Animals were postoperatively hydrated with 1 mL lactated Ringer's (subcutaneous) and housed in a temperature controlled (37° C.) environment until achieving an ambulatory recovery. 3 weeks after surgery animals were euthanized by deep anesthesia followed by tissue removal for nuclei sorting or with 4% paraformaldehyde perfusion for immunochemistry.

### Sorting Nuclei and In Vivo Results

[1071] Applicants designed a method to specifically genetically tag the gRNA targeted neuronal cell nuclei with GFP for Fluorescent Activated Cell Sorting (FACS) of the labeled cell nuclei and downstream processing of DNA, RNA and nuclear proteins. To that purpose the applicants' multiplex targeting vector was designed to express both a fusion protein between GFP and the mouse nuclear membrane protein domain KASH (Starr DA, 2011, Current biology) and the 3 gRNAs to target specific gene loci of interest (FIG. 34). GFP-KASH was expressed under the control of the human Synapsin promoter to specifically label neurons. The amino acid of the fusion protein GFP-KASH was:

(SEQ ID NO: 1563)
MVSKGEELFTGVVPILVELDGDVNGHKFSVSGEGEGDATYGKLTL
KFICTTGKLPVPWPTLVTTLTYGVQCFSRYPDHMKQHDFFKSAMP
EGYVQERTIFFKDDGNYKTRAEVKFEGDTL VNRIELKGIDFKED
GNILGHKLEYNYNSHNVYIMADKQKNGIKVNFKIRHNIEDGSVQL
ADHYQQNTPIGDGPVLLPDNHYLSTQSALSKDPNEKRDHMVLLEF
VTAAGITLGMDELYKSGLRSREEEEETDSRMPHLDSPGSSQPRRS
FLSRVIRAALPLQLLLLLLLLLACLLPASEDDYSCTQANNFARSF
YPMLRYTNGPPPT

[1072] One week after AAV1/2 mediated delivery into the brain a robust expression of GFP-KASH was observed. For FACS and downstream processing of labeled nuclei, the hippocampi were dissected 3 weeks after surgery and processed for cell nuclei purification using a gradient centrifugation step. For that purpose the tissue was homogenized in 320 mM Sucrose, 5 mM CaCl, 3 mM Mg(Ac)2, 10 mM Tris pH 7.8, 0.1 mM EDTA, 0.1% NP40, 0.1 mM Phenylmethanesulfonyl fluoride (PMSF), 1 mM β-mercaptoethanol using 2 ml Dounce homogenizer (Sigma) The homogenisate was centrifuged on a 25% to 29% Optiprep® gradient according to the manufacture's protocol for 30 min at 3.500 rpm at 4° C. The nuclear pellet was resuspended in 340 mM Sucrose, 2 mM MgCl2, 25 mM KCl, 65 mM glycerophosphate, 5% glycerol, 0.1 mM PMSF, 1 mM β-mercaptoethanol and Vybrant® DyeCycle™ Ruby Stain (Life technologies) was added to label cell nuclei (offers near-infrared emission for DNA). The labeled and purified nuclei were sorted by FACS using an Aria Flu-act-cell sorter and BDFACS Diva software. The sorted GFP+ and GFP-nuclei were finally used to purify genomic DNA using DNAeasy Blood & Tissue Kit (Qiagen) for Surveyor assay analysis of the targeted genomic regions. The same approach can be easily used to purify nuclear RNA or protein from targeted cells for downstream processing. Due to the 2-vector system (FIG. 34) the applicants using in this approach efficient Cas9 mediated DNA cleavage was expected to occur only in a small subset of cells in the brain (cells which were co-infected with both the multiplex targeting vector and the Cas9 encoding vector). The method described here enables the applicants to specifically purify DNA, RNA and nuclear proteins from the cell population expressing the 3 gRNAs of interest and therefore are supposed to undergo Cas9 mediated DNA cleavage. By using this method the applicants were able to visualize efficient DNA cleavage in vivo occurring only in a small subset of cells.

[1073] Essentially, what Applicants have shown here is targeted in vivo cleavage. Furthermore, Applicants used a multiple approach, with several different sequences targeted at the same time, but independently. Presented system can be applied for studying brain pathologic conditions (gene knock out, e.g. Parkinson disease) and also open a field for further development of genome editing tools in the brain. By replacing nuclease activity with gene transcription regulators or epigenetic regulators it will be possible to answer whole spectrum of scientific question about role of gene regulation and epigenetic changes in the brain in not only in the pathologic conditions but also in physiological process as learning and memory formation. Finally, presented technology can be applied in more complex mammalian system as primates, what allows to overcome current technology limitations.

### Example 26: AAV Production System or Protocol

[1074] An AAV production system or protocol that was developed for, and works particularly well with, high through put screening uses is provided herein, but it has broader applicability in the present invention as well. Manipulating endogenous gene expression presents various challenges, as the rate of expression depends on many factors, including regulatory elements, mRNA processing, and transcript stability. To overcome this challenge, Applicants developed an adeno-associated virus (AAV)-based vector for the delivery. AAV has an ssDNA-based genome and is therefore less susceptible to recombination.

[1075] AAV1/2 (serotype AAV1/2, i.e., hybrid or mosaic AAV1/AAV2 capsid AAV) heparin purified concentrated virus protocol
[1076] Media: D10+HEPES
[1077] 500 ml bottle DMEM high glucose+Glutamax (GIBCO)
[1078] 50 ml Hyclone FBS (heat-inactivated) (Thermo Fischer)
[1079] 5.5 ml HEPES solution (1M, GIBCO)
[1080] Cells: low passage HEK293FT (passage <10 at time of virus production, thaw new cells of passage 2-4 for virus production, grow up for 3-5 passages)
[1081] Transfection reagent: Polyethylenimine (PEI) “Max”
[1082] Dissolve 50 mg PEI “Max” in 50 ml sterile Ultrapure H20
[1083] Adjust pH to 7.1
[1084] Filter with 0.22 um fliptop filter
[1085] Seal tube and wrap with parafilm
[1086] Freeze aliquots at −20° C. (for storage, can also be used immediately)

### Cell Culture

[1087] Culture low passage HEK293FT in D10+HEPES
[1088] Passage everyday between 1:2 and 1:2.5
[1089] Advantageously do not allow cells to reach more than 85% confluency

### For T75

[1090] Warm 10 ml HBSS (-Mg2+, -Ca2+, GIBCO)+1 ml TrypLE Express (GIBCO) per flask to 37° C. (Waterbath)
[1091] Aspirate media fully
[1092] Add 10 ml warm HBSS gently (to wash out media completely)
[1093] Add 1 ml TrypLE per Flask
[1094] Place flask in incubator (37° C.) for 1 min
[1095] Rock flask to detach cells
[1096] Add 9 ml D10+HEPES media (37° C.)
[1097] Pipette up and down 5 times to generate single cell suspension
[1098] Split at 1:2-1:2.5 (12 ml media for T75) ratio (if cells are growing more slowly, discard and thaw a new batch, they are not in optimal growth)
[1099] transfer to T225 as soon as enough cells are present (for ease of handling large amounts of cells)

[1100] AAV production (5*15 cm dish scale per construct):
[1101] Plate 10 million cells in 21.5 ml media into a 15 cm dish
[1102] Incubate for 18-22 hours at 37° C.
[1103] Transfection is ideal at 80% confluence

[1104] Per plate
[1105] Prewarm 22 ml media (D10+HEPES)

[1106] Prepare tube with DNA mixture (use endofree maxiprep DNA):
[1107] 5.2 ug vector of interest plasmid
[1108] 4.35 ug AAV 1 serotype plasmid
[1109] 4.35 ug AAV 2 serotype plasmid
[1110] 10.4 ug pDF6 plasmid (adenovirus helper genes) Vortex to mix
[1111] Add 434 uL DMEM (no serum!)
[1112] Add 130 μl PEI solution
[1113] Vortex 5-10 seconds
[1114] Add DNA/DMEM/PEI mixture to prewarmed media
[1115] Vortex briefly to mix
[1116] Replace media in 15 cm dish with DNA/DMEM/PEI mixture
[1117] Return to 37° C. incubator
[1118] Incubate 48 h before harvesting (make sure medium isn't turning too acidic)

### Virus Harvest:

[1119] 1. aspirate media carefully from 15 cm dish dishes (advantageously do not dislodge cells)
[1120] 2. Add 25 ml RT DPBS (Invitrogen) to each plate and gently remove cells with a cell scraper. Collect suspension in 50 ml tubes.
[1121] 3. Pellet cells at 800×g for 10 minutes.
[1122] 4. Discard supernatant

[1123] Pause point: freeze cell pellet at −80 C if desired
[1124] 5. resuspend pellet in 150 mM NaCl, 20 mM Tris pH 8.0, use 10 ml per tissue culture plate.
[1125] 6. Prepare a fresh solution of 10% sodium deoxycholate in dH2O. Add 1.25 ml of this per tissue culture plate for a final concentration of 0.5%. Add benzonase nuclease to a final concentration of 50 units per ml. Mix tube thoroughly.
[1126] 7. Incubate at 37° C. for 1 hour (Waterbath).
[1127] 8. Remove cellular debris by centrifuging at 3000×g for 15 mins. Transfer to fresh 50 ml tube and ensure all cell debris has been removed to prevent blocking of heparin columns.

### Heparin Column Purification of AAV1/2:

[1128] 1. Set up HiTrap heparin columns using a peristaltic pump so that solutions flow through the column at 1 ml per minute. It is important to ensure no air bubbles are introduced into the heparin column.
[1129] 2. Equilibrate the column with 10 ml 150 mM NaCl, 20 mM Tris, pH 8.0 using the peristaltic pump.
[1130] 3. Binding of virus: Apply 50 ml virus solution to column and allow to flow through.
[1131] 4. Wash step 1: column with 20 ml 100 mM NaCl, 20 mM Tris, pH 8.0. (using the peristaltic pump)
[1132] 5. Wash step 2: Using a 3 ml or 5 ml syringe continue to wash the column with 1 ml 200 mM NaCl, 20 mM Tris, pH 8.0, followed by 1 ml 300 mM NaCl, 20 mM Tris, pH 8.0.
[1133] Discard the flow-through.
[1134] (prepare the syringes with different buffers during the 50 min flow through of virus solution above)
[1135] 6. Elution Using 5 ml syringes and gentle pressure (flow rate of <1 ml/min) elute the virus from the column by applying:
   [1136] 1.5 ml 400 mM NaCl, 20 mM Tris, pH 8.0
   [1137] 3.0 ml 450 mM NaCl, 20 mM Tris, pH 8.0
   [1138] 1.5 ml 500 mM NaCl, 20 mM Tris, pH 8.0
[1139] Collect these in a 15 ml centrifuge tube.

### Concentration of AAV1/2:

[1140] 1. Concentration step 1: Concentrate the eluted virus using Amicon ultra 15 ml centrifugal filter units with a 100,000 molecular weight cutoff. Load column eluate into the concentrator and centrifuge at 2000×g for 2 minutes (at room temperature. Check concentrated volume—it should be approximately 500 μl. If necessary, centrifuge in 1 min intervals until correct volume is reached.
[1141] 2. buffer exchange: Add 1 ml sterile DPBS to filter unit, centrifuge in 1 min intervals until correct volume (500 μl) is reached.
[1142] 3. Concentration step 2: Add 500 μl concentrate to an Amicon Ultra 0.5 ml 100K filter unit. Centrifuge at 6000 g for 2 min. Check concentrated volume—it should be approximately 100 μl. If necessary, centrifuge in 1 min intervals until correct volume is reached.
[1143] 4. Recovery: Invert filter insert and insert into fresh collection tube. Centrifuge at 1000 g for 2 min.
[1144] Aliquot and freeze at −80° C.
[1145] 1 ul is typically required per injection site, small aliquots (e.g. 5 μl) are therefore recommended (avoid freeze-thaw of virus).
[1146] determine DNaseI-resistant GC particle titer using qPCR (see separate protocol)

### Materials

[1147] Amicon Ultra, 0.5 ml, 100K; MILLIPORE; UFC510024
[1148] Amicon Ultra, 15 ml, 100K; MILLIPORE; UFC910024
[1149] Benzonase nuclease; Sigma-Aldrich, E1014
[1150] HiTrap Heparin cartridge; Sigma-Aldrich; 54836
[1151] Sodium deoxycholate; Sigma-Aldrich; D5670

### AAV1 Supernatant Production Protocol

[1152] Media: D10+HEPES
[1153] 500 ml bottle DMEM high glucose+Glutamax (Invitrogen)
[1154] 50 ml Hyclone FBS (heat-inactivated) (Thermo Fischer)
[1155] 5.5 ml HEPES solution (1M, GIBCO)
[1156] Cells: low passage HEK293FT (passage <10 at time of virus production)
[1157] Thaw new cells of passage 2-4 for virus production, grow up for 2-5 passages
[1158] Transfection reagent: Polyethylenimine (PEI) “Max”
[1159] Dissolve 50 mg PEI “Max” in 50 ml sterile Ultrapure H20
[1160] Adjust pH to 7.1
[1161] Filter with 0.22 um fliptop filter
[1162] Seal tube and wrap with parafilm
[1163] Freeze aliquots at −20° C. (for storage, can also be used immediately)
[1164] Cell Culture
[1165] Culture low passage HEK293FT in D10+HEPES Passage everyday between 1:2 and 1:2.5
[1166] Advantageously do let cells reach more than 85% confluency
[1167] For T75
   [1168] Warm 10 ml HBSS (-Mg2+, -Ca2+, GIBCO)+1 ml TrypLE Express (GIBCO) per flask to 37° C. (Waterbath)
   [1169] Aspirate media fully
   [1170] Add 10 ml warm HBSS gently (to wash out media completely)
   [1171] Add 1 ml TrypLE per Flask
   [1172] Place flask in incubator (37° C.) for 1 min
   [1173] Rock flask to detach cells
   [1174] Add 9 ml D10+HEPES media (37° C.)
   [1175] Pipette up and down 5 times to generate single cell suspension
   [1176] Split at 1:2-1:2.5 (12 ml media for T75) ratio (if cells are growing more slowly, discard and thaw a new batch, they are not in optimal growth)
   [1177] transfer to T225 as soon as enough cells are present (for ease of handling large amounts of cells)
[1178] AAV production (single 15 cm dish scale)
[1179] Plate 10 million cells in 21.5 ml media into a 15 cm dish
[1180] Incubate for 18-22 hours at 37° C.
[1181] Transfection is ideal at 80% confluence per plate
[1182] Prewarm 22 ml media (D10+HEPES)
[1183] Prepare tube with DNA mixture (use endofree maxiprep DNA):
[1184] 5.2 ug vector of interest plasmid
[1185] 8.7 ug AAV 1 serotype plasmid
[1186] 10.4 ug DF6 plasmid (adenovirus helper genes)
[1187] Vortex to mix
[1188] Add 434 uL DMEM (no serum!) Add 130 μl PEI solution
[1189] Vortex 5-10 seconds
[1190] Add DNA/DMEM/PEI mixture to prewarmed media
[1191] Vortex briefly to mix
[1192] Replace media in 15 cm dish with DNA/DMEM/PEI mixture
[1193] Return to 37° C. incubator
[1194] Incubate 48 h before harvesting (advantageously monitor to ensure medium is not turning too acidic)

### Virus Harvest:

[1195] Remove supernatant from 15 cm dish
[1196] Filter with 0.45 μm filter (low protein binding) Aliquot and freeze at −80° C.
[1197] Transduction (primary neuron cultures in 24-well format, 5 DIV)
[1198] Replace complete neurobasal media in each well of neurons to be transduced with fresh neurobasal (usually 400 μl out of 500 μl per well is replaced)
[1199] Thaw AAV supernatant in 37° C. waterbath
[1200] Let equilibrate in incubator for 30 min
[1201] Add 250 μl AAV supernatant to each well
[1202] Incubate 24 h at 37° C.
[1203] Remove media/supernatant and replace with fresh complete neurobasal
[1204] Expression starts to be visible after 48 h, saturates around 6-7 Days Post Infection
[1205] Constructs for pAAV plasmid with GOI should not exceed 4.8 kb including both ITRS.

[1206] Example of a human codon optimized sequence (i.e. being optimized for expression in humans) sequence: SaCas9 is provided below:

(SEQ ID NO: 1564)
ACCGGTGCCACCATGTACCCATACGATGTTCCAGATTACGCTTCG
CCGAAGAAAAAGCGCAAGGTCGAAGCGTCCATGAAAAGGAACTAC
ATTCTGGGGCTGGACATCGGGATTACAAGCGTGGGGTATGGGATT
ATTGACTATGAAACAAGGGACGTGATCGACGCAGGCGTCAGACTG
TTCAAGGAGGCCAACGTGGAAAACAATGAGGGACGGAGAAGCAAG
AGGGGAGCCAGGCGCCTGAAACGACGGAGAAGGCACAGAATCCAG
AGGGTGAAGAAACTGCTGTTCGATTACAACCTGCTGACCGACCAT
TCTGAGCTGAGTGGAATTAATCCTTATGAAGCCAGGGTGAAAGGC
CTGAGTCAGAAGCTGTCAGAGGAAGAGTTTTCCGCAGCTCTGCTG
CACCTGGCTAAGCGCCGAGGAGTGCATAACGTCAATGAGGTGGAA
GAGGACACCGGCAACGAGCTGTCTACAAAGGAACAGATCTCACGC
AATAGCAAAGCTCTGGAAGAGAAGTATGTCGCAGAGCTGCAGCTG
GAACGGCTGAAGAAAGATGGCGAGGTGAGAGGGTCAATTAATAGG
TTCAAGACAAGCGACTACGTCAAAGAAGCCAAGCAGCTGCTGAAA
GTGCAGAAGGCTTACCACCAGCTGGATCAGAGCTTCATCGATACT
TATATCGACCTGCTGGAGACTCGGAGAACCTACTATGAGGGACCA
GGAGAAGGGAGCCCCTTCGGATGGAAAGACATCAAGGAATGGTAC
GAGATGCTGATGGGACATTGCACCTATTTTCCAGAAGAGCTGAGA
AGCGTCAAGTACGCTTATAACGCAGATCTGTACAACGCCCTGAAT
GACCTGAACAACCTGGTCATCACCAGGGATGAAAACGAGAAACTG
GAATACTATGAGAAGTTCCAGATCATCGAAAACGTGTTTAAGCAG
AAGAAAAAGCCTACACTGAAACAGATTGCTAAGGAGATCCTGGTC
AACGAAGAGGACATCAAGGGCTACCGGGTGACAAGCACTGGAAAA
CCAGAGTTCACCAATCTGAAAGTGTATCACGATATTAAGGACATC
ACAGCACGGAAAGAAATCATTGAGAACGCCGAACTGCTGGATCAG
ATTGCTAAGATCCTGACTATCTACCAGAGCTCCGAGGACATCCAG
GAAGAGCTGACTAACCTGAACAGCGAGCTGACCCAGGAAGAGATC
GAACAGATTAGTAATCTGAAGGGGTACACCGGAACACACAACCTG
TCCCTGAAAGCTATCAATCTGATTCTGGATGAGCTGTGGCATACA
AACGACAATCAGATTGCAATCTTTAACCGGCTGAAGCTGGTCCCA
AAAAAGGTGGACCTGAGTCAGCAGAAAGAGATCCCAACCACACTG
GTGGACGATTTCATTCTGTCACCCGTGGTCAAGCGGAGCTTCATC
CAGAGCATCAAAGTGATCAACGCCATCATCAAGAAGTACGGCCTG
CCCAATGATATCATTATCGAGCTGGCTAGGGAGAAGAACAGCAAG
GACGCACAGAAGATGATCAATGAGATGCAGAAACGAAACCGGCAG
ACCAATGAACGCATTGAAGAGATTATCCGAACTACCGGGAAAGAG
AACGCAAAGTACCTGATTGAAAAAATCAAGCTGCACGATATGCAG
GAGGGAAAGTGTCTGTATTCTCTGGAGGCCATCCCCCTGGAGGAC
CTGCTGAACAATCCATTCAACTACGAGGTCGATCATATTATCCCC
AGAAGCGTGTCCTTCGACAATTCCTTTAACAACAAGGTGCTGGTC
AAGCAGGAAGAGAACTCTAAAAAGGGCAATAGGACTCCTTTCCAG
TACCTGTCTAGTTCAGATTCCAAGATCTCTTACGAAACCTTTAAA
AAGCACATTCTGAATCTGGCCAAAGGAAAGGGCCGCATCAGCAAG
ACCAAAAAGGAGTACCTGCTGGAAGAGCGGGACATCAACAGATTC
TCCGTCCAGAAGGATTTTATTAACCGGAATCTGGTGGACACAAGA
TACGCTACTCGCGGCCTGATGAATCTGCTGCGATCCTATTTCCGG
GTGAACAATCTGGATGTGAAAGTCAAGTCCATCAACGGCGGGTTC
ACATCTTTTCTGAGGCGCAAATGGAAGTTTAAAAAGGAGCGCAAC
AAAGGGTACAAGCACCATGCCGAAGATGCTCTGATTATCGCAAAT
GCCGACTTCATCTTTAAGGAGTGGAAAAAGCTGGACAAAGCCAAG
AAAGTGATGGAGAACCAGATGTTCGAAGAGAAGCAGGCCGAATCT
ATGCCCGAAATCGAGACAGAACAGGAGTACAAGGAGATTTTCATC
ACTCCTCACCAGATCAAGCATATCAAGGATTTCAAGGACTACAAG
TACTCTCACCGGGTGGATAAAAAGCCCAACAGAGAGCTGATCAAT
GACACCCTGTATAGTACAAGAAAAGACGATAAGGGGAATACCCTG
ATTGTGAACAATCTGAACGGACTGTACGACAAAGATAATGACAAG
CTGAAAAAGCTGATCAACAAAAGTCCCGAGAAGCTGCTGATGTAC
CACCATGATCCTCAGACATATCAGAAACTGAAGCTGATTATGGAG
CAGTACGGCGACGAGAAGAACCCACTGTATAAGTACTATGAAGAG
ACTGGGAACTACCTGACCAAGTATAGCAAAAAGGATAATGGCCCC
GTGATCAAGAAGATCAAGTACTATGGGAACAAGCTGAATGCCCAT
CTGGACATCACAGACGATTACCCTAACAGTCGCAACAAGGTGGTC
AAGCTGTCACTGAAGCCATACAGATTCGATGTCTATCTGGACAAC
GGCGTGTATAAATTTGTGACTGTCAAGAATCTGGATGTCATCAAA
AAGGAGAACTACTATGAAGTGAATAGCAAGTGCTACGAAGAGGCT
AAAAAGCTGAAAAAGATTAGCAACCAGGCAGAGTTCATCGCCTCC
TTTTACAACAACGACCTGATTAAGATCAATGGCGAACTGTATAGG
GTCATCGGGGTGAACAATGATCTGCTGAACCGCATTGAAGTGAAT
ATGATTGACATCACTTACCGAGAGTATCTGGAAAACATGAATGAT
AAGCGCCCCCCTCGAATTATCAAAACAATTGCCTCTAAGACTCAG
AGTATCAAAAAGTACTCAACCGACATTCTGGGAAACCTGTATGAG
GTGAAGAGCAAAAAGCACCCTCAGATTATCAAAAAGGGCTAAGAA
TTC

### Example 27: Minimizing Off-Target Cleavage Using Cas9 Nickase and Two Guide RNAs

[1207] Cas9 is a RNA-guided DNA nuclease that may be targeted to specific locations in the genome with the help of a 20 bp RNA guide. However the guide sequence may tolerate some mismatches between the guide sequence and the DNA-target sequence. The flexibility is undesirable due to the potential for off-target cleavage, when the guide RNA targets Cas9 to a an off-target sequence that has a few bases different from the guide sequence. For all experimental applications (gene targeting, crop engineering, therapeutic applications, etc) it is important to be able to improve the specificity of Cas9 mediated gene targeting and reduce the likelihood of off-target modification by Cas9.

[1208] Applicants developed a method of using a Cas9 nickase mutant in combination with two guide RNAs to facilitate targeted double strand breaks in the genome without off-target modifications. The Cas9 nickase mutant may be generated from a Cas9 nuclease by disabling its cleavage activity so that instead of both strands of the DNA duplex being cleaved only one strand is cleaved. The Cas9 nickase may be generated by inducing mutations in one ore more domains of the Cas9 nuclease, e.g. Ruvc1 or HNH. These mutations may include but are not limited to mutations in a Cas9 catalytic domain, e.g in SpCas9 these mutations may be at positions D10 or H840. These mutations may include but are not limited to D10A, E762A, H840A, N854A, N863A or D986A in SpCas9 but nickases may be generated by inducing mutations at corresponding positions in other CRISPR enzymes or Cas9 orthologs. In a most preferred embodiment of the invention the Cas9 nickase mutant is a SpCas9 nickase with a D10A mutation.

[1209] The way this works is that each guide RNA in combination with Cas9 nickase would induce the targeted single strand break of a duplex DNA target. Since each guide RNA nicks one strand, the net result is a double strand break. The reason this method eliminates off-target mutations is because it is very unlikely to have an off-target site that has high degrees of similarity for both guide sequences (20 bp+2 bp (PAM)=22 bp specificity for each guide, and two guides means any off-target site will have to have close to 44 bp of homologous sequence). Although it is still likely that individual guides may have off-targets, but those off-targets will only be nicked, which is unlikely to be repaired by the mutagenic NHEJ process. Therefore the multiplexing of DNA double strand nicking provides a powerful way of introducing targeted DNA double strand breaks without off-target mutagenic effects.

[1210] Applicants carried out experiments involving the co-transfection of HEK293FT cells with a plasmid encoding Cas9 (D10A) nickase as well as DNA expression cassettes for one or more guides. Applicants transfected cells using Lipofectamine 2000, and transfected cells were harvested 48 or 72 hours after transfections. Double nicking-induced NHEJ were detected using the SURVEYOR nuclease assay as described previously herein (FIGS. 51, 52 and 53).

[1211] Applicants have further identified parameters that relate to efficient cleavage by the Cas9 nickase mutant when combined with two guide RNAs and these parameters include but are not limited to the length of 5′ overhang. Efficient cleavage is reported for 5′ overhang of at least 26 base pairs. In a preferred embodiment of the invention, 5′ overhang is at least 30 base pairs and more preferably at least 34 base pairs. Overhangs of up to 200 base pairs may be acceptable for cleavage, while 5′ overhangs less than 100 base pairs are preferred and 5′ overhangs less than 50 base pairs are most preferred (FIGS. 54 and 55).

### Example 28: CRISPR HBV

[1212] A CRISPR system has been designed for targeting the hepatitis B virus, as described herein and illustrated in FIGS. 36 to 72; and, this system has been demonstrated to be therapeutic.

[1213] The Figures associated with this Example are FIGS. 36 to 72, with FIGS. 36 and 57 demonstrating guide design. FIG. 38 shows qPCR results from 1st round of HepG2.2.15 experiments. FIG. 39 shows a Surveyor assay for nuclease activity. Indels form as the result of imperfect NHEJ events due to repeated DSB formation from nuclease activity. For Cas9 targeted genomic loci indel formation at rates 10-30% are often observed and can approach 50%. FIG. 40 shows representative surveyor for 1st set of HepG2.2.15 experiments. FIG. 41 shows HepG2.2.15 HBV quantification scheme, an experimental design motivated by noise of initial data sets. FIG. 42 shows HepG2.2.15 results using sorting based normalization. FIG. 43 shows low levels of indels observed with guides targeting conserved HBV sequences in 2nd round of HepG2.2.15 experiments. FIG. 44 shows HepG2 co-transfection experiments. FIG. 45 shows HDD data for Cohort 1. FIG. 46 shows HDD data for Cohort 2. FIG. 47 shows HDD data for Cohort 2. FIG. 48 shows HDD data for Cohort 2. FIG. 49 shows Cohort 2-liver analysis 9d post HDD. FIG. 50 shows Cohort 2-liver analysis 9d post HDD. FIG. 51 shows low/no indels formed during HDD experiments. Predicted band sizes for guide 21 formation: 235+272+507 bp (undigested PCR product). FIG. 52 shows HDD Cohort 3 Results: HBsAg. FIG. 53 shows HDD Cohort 3 Results: Viremia. FIG. 54 shows HDD Cohort 3 Results: HBV in Liver. FIG. 55 shows HDD Cohort 3 Results: Luciferase normalized to GAPDH. FIG. 56 shows despite low/no indel formation, effects on HBV are dependent on Cas9 nuclease activity. FIG. 57 shows schematic of HBV life cycle and putative anti-HBV effect of CRISPR constructs as well as HBV genome organization and location of target sequences for several tested guide RNA constructs. FIG. 58 shows guide RNAs targeting conserved regions target large majority of patient-derived virus genomes, a schematic and results for HepG2 transfection experiment. FIG. 59 shows Experimental schematic and results for hydrodynamic injection experiments. FIG. 60 shows the HBV life cycle within HepG2.2.15 cells and schematic of lentiviral vector and experimental strategy for sustained CRISPR expression within HepG2.2.15 cells. FIG. 61 shows that HBV-targeting CRISPR reduces HBV DNA and cccDNA dependent upon HBV-specific guide RNA and Cas9 activity. FIG. 62 shows HBV products are reduced upon long-term CRISPR/Cas expression. FIG. 63 shows that CRISPR constructs targeting HBV cause large and progressive reduction in cccDNA and total HBV DNA levels dependent on successful targeting of viral DNA. FIG. 64 shows HBV DNA and cccDNA reductions upon long-term CRISPR/Cas expression are produced with multiple guides. FIG. 65 shows Southern blot of HBV DNA. FIG. 66 shows Southern blot of HBV DNA. FIG. 67 shows Surveyor assay to detect indel formation in total HBV DNA and episomal HBV DNA. FIG. 68 demonstrates large reduction in HBV Core protein staining upon targeting by g17 specifically against the Core ORF as determined by immunofluorescence. FIG. 69 shows schematics for de novo infection experiments. FIG. 70 shows HBsAg secretion, cccDNA copies, levels of HBV 3.5 kb RNA relative to 5 bp mismatch control and titer of HBV DNA in culture medium in de novo infection context. FIG. 71 shows CRISPR/Cas-mediated disruption of HBV in patient-derived virus model system. FIG. 72 shows Surveyor assay results.

[1214] Construction of CRISPR Constructs. Cas9 constructs with 24 guide RNAs targeting sequences present in the HBV genome integrated into the HepG2.2.15 cell line were used for these experiments (Sells et. al., PNAS 1987). Oligos corresponding to target sequences were ligated into BbsI (ThermoScientific #FD1014) digested plasmid PX330a or BsmBI (ThermoScientific #FD0454) digested plasmid PHBC013 using T7 ligase (Enzymatics L6020L) (Hsu et. al., “DNA targeting specificity of RNA-guided Cas9 nucleases,” Nature Biotechnology 31,827-832 (2013) (Hsu et al Nat Biotechnol 2013)). PX330a contains a U6 promoter driving expression of the +85 guide RNA described in Hsu et. al. (Nat Biotechnol 2013) and a mammalian codon optimized NLS-Cas9-NLS from S. pyogenes SF370 driven by the CBh promoter. PHBC013 contains the U6 guide RNA expression system from PX330a and NLS-Cas9-P2A-mCherry driven by the EFS promoter. PHBC013 was created from pHKO_015 by digesting pHKO_015 with NheI (ThermoScientific #FD0974) and Mlu1 (ThermoScientific #FD0564) and then inserting mCherry using Gibson Assembly with the Gibson Assembly Master Mix (NEB, #E2611L). The red fluorescent mCherry marker makes it easy to see which cells have been transfected with the vector. See FIG. 57B for an illustration of the constructs. Two sets of control constructs were generated. Mismatched guide RNA control constructs for promising guide RNA molecules were created by ligating in oligos to PX330a or PHBC013 that contained 5 basepair mismatches at the 3′ end of the spacer, but were otherwise identical to constructs designed to target HBV. Cas9 D10A/H840A nuclease dead control constructs were generated by digesting pHBC013 guide RNA containing constructs with BamHI and NheI and then inserting a PCR amplified D10A/H840A Cas9 using Gibson Assembly. D10A and H840A are mutations that are sufficient to abolish the nuclease activity of S. pyogenes SF370 Cas9 (Cong et. al. “Multiplex genome engineering using CRISPR/Cas systems,” Science 339, 819-823, Sapranauskas et. al. “The Streptococcus thermophilus CRISPR/Cas system provides immunity in Escherichia coli,” Nucleic Acids Res November 2011; 39 (21): 9275-9282.). The control vectors still express the sgRNA.

[1215] Guide RNAs: Available genome sequences reveal that various genomic regions are well conserved across multiple strains. Numbered according to the ayw serotype the following genomic regions are well conserved: Table 32.

| Nucleotides | Genomic region |
|---|---|
| 153-286 | S |
| 376-401 | S |
| 1113-1319 | Pol, Enh I |
| 1393-1462 | Pol, X |
| 1860-1979 | Precore/Core, Poly A signal |
| 2356-2457 | Core, Pol |

[1216] 24 guide RNAs have been designed to target the HBV genome (FIGS. 36, 57). These include targets which are highly conserved within the HBV genome. Moreover, guide sequences can be designed to minimize possible off-target sites within the human genome e.g. to include at least 2 mismatches relative to any other sequence in the published human genome sequence. For instance, the closest matches in the human genome for guide G6 differs by at least 3 nucleotides (2 hits) or 4 nucleotides (43 hits).

[1217] Furthermore, the HBV genome includes 162 NGG PAMs within genome (41 of which are in conserved tracts) and 160 NAG PAMs (32 in conserved tracts).

[1218] In addition, the target sequences can be assessed against available complete HBV genome sequences deposited in GENBANK (5052 complete sequenced genomes) to check coverage against patient-derived virus isolates. For instance, 91.2% of these sequences have a perfect match for guide G6, and 87.3% have a perfect match for guide G21.

[1219] Guide RNAs were of the form 5′-G (N19)-3′ (wherein N is any of AUC or G) with their target sequences having the form of 5′-G (N19)-NGG-3′ (wherein N is any of ATC or G). Guides 1-12 were designed to target all 4 ORFs and guides 13-24 were designed against HBV sequences that were conserved across HBV genotypes (See, e.g., U.S. Pat. No. 8,350,021). See also FIGS. 36, 57. Thus, for guides 1-12, the target motif 5′-G (N19)-NGG-3′ appears in all of the 4 ORFs of HBV, and hence the guide RNA binds accordingly to said motifs. Likewise, for guides 13-24, the target motifs 5′-G (N19)-NGG-3′ are conserved across HBV genotypes and guide RNA binds accordingly. Advantageous guides, G6, G17, and G21 have the following sequences:

Guide 6
SEQ ID NO: 1565
5'-ggggcgcacctctctttacg-3'
Guide 17
SEQ ID NO: 1566
5'-taaagaatttggagctactg-3'
Guide 21
SEQ ID NO: 1567
5'-tcctctgccgatccatactg-3'

[1220] The putative mechanism of action for the CRISPR complexes is on the cccDNA which is produced during HBV infection and can remain latent in the nucleus for years. It is postulated that cccDNA is cleaved by Cas9 after hybridization to the designed guide RNAs. Thus, FIG. 37 illustrates a means for determining cccDNA of HBV.

[1221] Experiments to test the guide RNAs, as described below, used either HepG2 cells which were artificially infected with HBV, or HepG2 2.15 cells which have an overlength linear double stranded HBV DNA segment integrated into their genome and constitutively produce HBV transcripts, infectious virions and cccDNA.

[1222] Cells and Reagents. HepG2 2.15 cells were maintained in DMEM+10% Fetal Bovine Serum/1× Penicillin/Streptomycin (maintenance medium) for long-term culture, and passaged every 5-7 days. See also Cohen et al, 2010. All cells used were between passage 4 and passage 8. Up to 1 week prior to treatment, HepG2 2.15 cells were treated with 2% DMSO in order to promote growth arrest for accurate cell quantification, and to promote hepatic differentiation and increase HBV replication and cccDNA formation.

[1223] Transient transfection Experiments HepG2 2.15 cells: HepG2 cells were plated at ˜30% confluency and grown until 50% confluency, and then were co-transfected with the plasmid shown in FIG. 57B (lentiviral backbone with an mCherry reporter), and a 1.3× length WT HBV plasmid was used as previously described (Doitsh, G. et al. 2004), using the Mirus Trans-IT transfection reagent. Cells were washed and fed after 24 hours, and supernatant and cell pellets were assayed at 72 hours post transfection.

[1224] Transfection Experiments HepG2 2.15 cells. HepG2 2.15 cells were plated on standard tissue-culture plastic that had been coated with 50 μg/mL Collagen I (Rat tail collagen I, BD) at a confluency of 40-80%. 24 hours post seeding, transfection polyplexes were formed by incubating selected CRISPR-Cas or control plasmid DNA at a 1:3 ratio with TransIT 2020 (Mirus) transfection reagent in Opti-MEM reduced serum media for 30 minutes. HepG2 2.15 cells were washed, and transfection mixture was added to the cells at a dose of 250 ng DNA/1 cm2 growth area. Transfection was carried out for 48 hours, and then cells were washed 3 times in maintenance medium and cultured for an additional 24 hours. Finally, cells were harvested and prepared for fluorescence activated cell sorting (FACS) by standard protocols, with the addition of Sytox Blue dye to label dead cells. Cells were analyzed by FACS and a given number of and single, living cells were collected from each condition in each of two groups: mCherry+ (successfully transfected) and mCherry-(unsuccessfully transfected) (FIG. 41). These cells were harvested either into lysis buffer (for DNA quantification) or Trizol reagent (for RNA quantification) and the resulting material was analyzed by Applicants' standard assays.

[1225] Lentivirus production: 293T cells were co-transfected with the sgRNA-Cas9-2A-Puro lentiviral vectors (FIG. 60B) and a 2nd-generation lentiviral packaging system (psPAX2 and pMD2.G) at a ratio of 3:2:1. Cells were washed 24 h after transfection, supernatant was collected every 24 h from 48-96 h post transfection, and cell debris was removed by centrifugation. Lentivirus was concentrated by ultracentifugation for 1.5 h at 16,600×g, incubated O/N in Optimem at 4 C, then resuspended in Optimem, aliquoted and frozen at −80 C the next day, prior to use.

[1226] Lentiviral transduction: HepG2 2.15 cells were plated at 50% confluency and inoculated at MOI of 1 with concentrated lentivirus (produced as described above). Transduction was performed by mixing lentivirus aliquots with standard HepG2.2.15 culture medium, washing cells and adding lentivirus-containing medium at 2.5 mL/well in a 6-well plate, centrifuging for 1 h at 200×g and then incubating for an additional 23 h. 24 h after addition of lentivirus, cells were washed 3× and incubated in standard medium+2.5 ug/mL puromycin to remove untransduced cells. Puromycin selection was continued for 48 h, then cells were washed 3× and maintained in standard medium. Transduced cells were then continually passaged upon reaching 80% confluence; at each passage, cells were counted, cell pellets were harvested for each condition, and a portion of the remaining cells were reseeded at 10% confluence. Cells with lentiviral constructs looked phenotypically normal and exhibited no growth defects over at least 10 weeks in culture.

[1227] In vitro Cotransfection Experiments: HepG2 cells were seeded at 60-70% confluence on collagen pre-coated plates. 24 h after seeding cells were transfected with 1.3×HBV together with the corresponding CRISPR encoding constructs using Trans-IT 2020 (MIRUS) transfection reagent at a ratio of 1:4, respectively. 48-72 after transfection medium was collected and analyzed for HBsAg using a commercial ELISA kit (Bio-Rad). Cells were collected at the same time, RNA was extracted with TRIZOL and cDNA was synthesized using SuperScript (Invitrogen) kit. Q PCR was done using specific primers for HBV pgRNA. Normalization was done to human RPS11 housekeeping gene.

[1228] In vivo Hydrodynamic Co-Injection Experiments. NRG mice were hydro dynamically injected (HDD) as previously described (Lewis, D. L. et al., 2005) with 1.3×HBV plasmid (15 ug) together with CRIPSR encoding (20 ug) and firefly luciferase (10 ug) encoding plasmids (pSPORT6-Fluc) in a volume equal to 0.15 times the animal weight (in mls). Animals were injected through the tail vein in 7-9 sec and subsequentially bled every few days. At the time of bleeding animals were visualized using the IVIS machine and luciferase expression was quantified. Blood was analyzed for HBsAg using a commercial ELISA kit and for serum HBV DNA (viremia) by Q-PCR using TaqMan mastermix with HBV specific primers and probe. Quantification was done according to a standard curve with known concentrations of 2×HBV plasmid. HBsAg and DNA levels were normalized to luciferase expression at the corresponding day. 4 or 9 days after HDD animals were sacrificed, livers were collected and DNA was extracted following homogenization. The resulting DNA was subjected to QPCR for the following: total HBV DNA, cccDNA (following treatment of DNA with plasmid safe DNase and using cccDNA specific primers), GAPDH and luciferase.

[1229] Effect on pgRNA and cccDNA. The designed guide RNAs were studied for their effect on HBV pre-genomic mRNA (pgRNA) and on covalent-closed circular DNA (cccDNA), both of which are essential parts of the HBV life cycle.

[1230] Detection of secreted Hepatitis B Surface antigen in media supernatant: 100 μl of medium was loaded on ELISA plates coated with mouse monoclonal anti HBsAg antibodies (Bio-Rad, GS HBsAg EIA 3.0, Cat. No. 32591). ELISA protocol was done according to the manufacturer's instructions. Plates were read using the FLUOstar Omega machine (BMG LABTECH).

[1231] Hepatitis B e Antigen ELISA: The HBV E Antigen ELISA was performed using the Hepatitis B e Antigen (HBeAg) chemiluminescence Immunoassay kit (Autobio Diagnostics Co, Cat No. CL0312-2) according to the manufacturer's instructions.

[1232] Immunostaining for HBV Core antigen: Cells were grown on chambered coverglasses (Lab-Tek, Rochester, NY), washed with PBS, and then fixed with 4% paraformaldehyde. Cells were washed again (3×PBS) and treated with 100 mM glycine solution in PBS. After permeabilization with 0.1% Triton X-100 in PBS and treated with Image-iT™ FX signal enhancer (Life Technologies). Cells were blocked in PBS/10% goat serum (Jackson Immunosearch)/1% BSA. HBV core staining was achieved by using a polyclonal rabbit anti-HBV core antibody (Dako, CA) diluted 1:1000 in PBS/0.1% BSA (18 h at 4° C.). As a secondary antibody a goat-anti-rabbit labeled with AlexaFluor594 (Life Technologies) diluted 1:2000 in PBS/0.1% BSA was used. Nuclear staining was achieved using DAPI treatment. Image acquisition was performed in a Zeiss confocal microscope and image analysis was done using ImageJ (NIH, Bethesda, MD).

[1233] HBV DNA quantification: HBV genomic DNA was quantified at days 21 and 36. For cccDNA quantification DNA from cells was subjected to overnight digestion with a plasmid-safe DNase (Epicentre) as previously described (Yan H et al, “Sodium taurocholate cotransporting polypeptide is a functional receptor for human hepatitis B and D virus, eLife 2012 Nov. 13; 1: e00049. doi: 10.7554/eLife.00049 (2012)). Following enzyme inactivation at 70° C. for 30 min, DNA was subjected to real-time PCR using cccDNA specific primers previously described by Glebe et al., “Pre-sl antigen-dependent infection of Tupaia hepatocyte cultures with human hepatitis B virus,”. J Virol. 2003; 77 (17): 9511-9521. The primers used for cccDNA amplification: 5′TGCACTTCGCTTCACCT3′ (SEQ ID NO: 1568) (sense) 5′ AGGGGCATTTGGTGGTC3′ (SEQ ID NO: 1569) (anti sense). For quantification, a standard curve derived from decreasing concentrations of 2×HBV plasmid was used. Also, PCR for HBV DNA was done using the TaqMan® Universal PCR Master Mix (Applied Bio systems, Cat No 4304437) and the following primers and probe: 5′CCGTCTGTGCCTTCTCATCTG3′ (SEQ ID NO: 1570) (sense), 5′AGTCCAAGAGTCCTCTTATGTAAGACCTT3′ (SEQ ID NO: 1571) (anti sense), 5-/56-FAM/CCG TGT GCA/ZEN/CTT CGCTTC ACCTCT GC/3IABKFQ/-3 (SEQ ID NO: 1572) (probe). PCR was done using the Roche LightCycler®480 PCR machine. Quantification was done by using a standard curve composed from 2×HBV plasmid in a concentration range of 109-101 copies.

[1234] cccDNA extraction and analysis. DNA extracted from cells was subjected to ON digestion with a plasmid-safe DNase (Epicentre) as previously described (Yan H. et al., 2012). Following enzyme inactivation at 70° C. for 30 min, DNA was subjected to real-time PCR using SYBR® Premix Ex Taq (TaKaRa) following a previously described protocol (Yan H. et al., 2012) and using cccDNA specific primers previously described by Glebe et al., (2012). The primers used for cccDNA amplification:

(SEQ ID NO: 1568)
5'TGCACTTCGCTTCACCT3'
(sense)
(SEQ ID NO: 1569)
5' AGGGGCATTTGGTGGTC3'
(anti sense)

[1235] For quantification, a standard curve derived from decreasing concentrations of 2×HBV plasmid was used. PCR was performed using the Roche LightCycler®480 PCR machine.

[1236] HBV mRNA quantification: Total RNA was isolated via TRIZOL RNA/DNA extraction. After being subjected to DNaseI treatment, RNA was quantified using a NanoDrop and first-strand cDNA was synthesized using SuperScript® III RT kit (INVITROGEN). Quantitative PCR for 3.5 kb RNA or total HBV RNA was carried out with SYBR Green PCR master Mix (Applied Biosystems) and using specific primers previously described (Yan H. et al., 2012). In each reaction an RT negative control was included to rule-out DNA carry over.

[1237] Southern blot analysis of HBV replication intermediates: Total DNA or Hirt's extract (low MW DNA) at day 29 was run on 0.8% agarose-TAE gel, followed by denaturation and southern blotting to a Hybond N nylon membrane (Amersham). Viral DNA was detected by hybridization with a ³²P random primed HBV probe, using the Prime-It II Random Primer Labeling Kit (Agilent Technologies, Cat No 300385). Following incubation and washing, membrane was visualized by phosphorImager and later exposed to film.

[1238] Surveyor assay: Targeted loci were amplified by PCR using Phusion Flash (NEB) or Heruclase II (Agilent) polymerases and primers listed below. PCR products were gel or PCR-purified using Qiagen kits and subject to the Surveyor assay (Transgenomics) according to the manufacturer's instructions. Indel rate for surveyor was calculated as described in Cong, L. et al. (2013).

### Surveyor Primers:

Guide6-F:
(SEQ ID NO: 1573)
TATCCATGGCTGCTAGGCTG
Guide6-R:
(SEQ ID NO: 1574)
AGTCAGAAGGCAAAAACGAGAG
Guide17-F1:
(SEQ ID NO: 1573)
TATCCATGGCTGCTAGGCTG
Guide17-R1:
(SEQ ID NO: 1569)
AGGGGCATTTGGTGGTC
Guide17-F2:
(SEQ ID NO: 1575)
AAATTGGTCTGCGCACCAGC
Guide17-R2:
(SEQ ID NO: 1576)
AGGTCTCTAGATGCTGGATCTTCC
Guide 21-F1:
(SEQ ID NO: 1577)
GGTTATCCTGCGTTAATGCCC
Guide21-R1:
(SEQ ID NO: 1578)
GTCCGCGTAAAGAGAGGTG
Guide 21-F2:
(SEQ ID NO: 1579)
TGAACCTTTACCCCGTTGCCC
Guide21-R2:
(SEQ ID NO: 1580)
AGAGAGTCCCAAGCGACCCC

[1239] Concerning FIG. 57A, the diagram depicts the life cycle of HBV, showing where the Cas9/sgRNA targeting the virus putatively acts. cccDNA produced from HBV infection is cleaved by Cas9 after sgRNA binding to conserved HBV target site. FIG. 57A also illustrates the plasmid encodes both the HBV-targeting sgRNA and the Cas9 protein along with an mCherry fluorescent protein for subsequent fluorescent sorting of successfully transfected cells. Concerning FIG. 57B, targets were chosen based on regions of extremely high sequence conservation among different HBV serotypes and on their low homology to the human genome (see FIG. 58A). The guide RNAs target several different regions of the genome, hitting different ORFs and transcriptional control elements.

[1240] HepG2 cells were co-transfected with 1.3×WT HBV and Cas9/sgRNA/mCherry plasmids and HBV replication was allowed to proceed for 72 hours (see schematic depicted at FIG. 58B). Then, supernatants were collected and cells lysed for RNA extraction. (FIG. 58C) ELISA for secreted HBsAg with either control guide RNA (untargeted guide RNA) or various HBV-targeting guide RNAs. (FIG. 58D) Fold change in 3.5 kb HBV pregenomic RNA (pgRNA) levels between untargeted and HBV-targeting guide RNAs. The Figures show levels of HBsAg quantified using ELISA, and guides 17 and 21 showed the best reductions. The Figures also show levels of pgRNA and, while these were lower using all of guides 13-21, the most impressive results were again seen with 17 and 21. Based on the results of these two assays, along with earlier preliminary data showing the strong cutting behavior of guide 6, the guides 6, 17, and 21 were chosen for further study.

[1241] Applicants next sought to evaluate the antiviral effect of Cas9 in vivo, to ensure that anti-HBV constructs functioned appropriately in primary hepatocytes. To do this, a mouse model of HBV was used, where HBV and Cas9/gRNA plasmids were introduced to the liver of immunodeficient mice (NRG) by hydrodynamic injection (HDI) (Lewis, D. L. et al., 2005) (FIG. 59A). Animals expressing Cas9 and g21 in this model showed a progressive suppression of HBV expression as compared to controls expressing Cas9 and a mutated gRNA (g21M; 3′ 5 bp mismatch), reflected by a decrease in HBsAg secretion and a 4-fold decrease in viremia at day 4 post injection (FIGS. 59B and 59C).

[1242] Applicants evaluated the efficacy of sustained Cas9/gRNA expression in inhibiting HBV using a model that more reliably recapitulates the HBV life cycle. For these studies, the HepG2.2.15 hepatoblastoma cell line was used which harbors both a functional HBV integrated form and cccDNA, and constitutively produces infectious virions (see FIG. 60A). FIG. 60 shows (a) the HBV life cycle within HepG2.2.15 cells. HepG2.2.15 cells contain genomically integrated linear 1.3×WT HBV sequences, from which viral proteins and cccDNA are constitutively produced via transcription followed by translation (proteins) or reverse transcription and nuclear re-import (cccDNA). The persistent HBV production in this system enables assay of the long-term anti-HBV effects of CRISPR/Cas systems targeting viral DNA; and (b) schematic of lentiviral vector and experimental strategy for sustained CRISPR expression within HepG2.2.15 cells. Concentrated lentiviral stocks encoding HBV-targeting sgRNA, Cas9, and a puromycin resistance element to allow for lentiviral transduction and subsequent selection of stable lines incorporating Cas9 and each guide RNA were produced. HepG2 2.15 cells were transduced with concentrated lentivirus encoding Cas9-2A-Puro or nuclease deficient (D10A/H840A “dead”) Cas9-2A-Puro and either guide 6, 17, or 21, or one of three different untargeted sequences, followed by puromycin selection to yield HepG2 2.15 lines stably expressing the CRISPR/Cas system. FIG. 61 shows that Guide 6, 17, and 21 drastically decreased total HBV DNA and cccDNA in a manner dependent on correct targeting to HBV, and on Cas9 nuclease activity. Comparing the results from 29 and 36 days post transduction, Applicants see that the levels of HBV DNA and cccDNA continue to decrease over time, consistent with results from lentiviral transduction of CRISPR/Cas in other cell systems. The Figures also show that the ‘dead’ Cas9 had little impact on the amount of HBV genomic DNA at day 21 or 36 (about 50 copies per cell), but that guides 6, 17 and 21 in combination with active Cas9 reduced DNA to fewer than 10 copies per cell at day 21, and even fewer copies at day 36. Thus the Cas9 system drastically decreased total HBV DNA and cccDNA in a manner dependent on correct targeting to HBV, and on Cas9 nuclease activity. Moreover, a similar effect was seen on cccDNA, which was almost undetectable using guide 21 (much less than 1 copy per cell on average) at day 36.

[1243] In separate control experiments, cells were also transduced with constructs containing gRNAs and a nuclease deficient Cas9 (D10A/H840A; dead Cas9) to control for nuclease-independent effects of Cas9 on viral fitness, or WT Cas9 with mutated gRNAs (gXM) to control for guide sequence-independent effects. Cas9/gRNAs induced robust suppression of HBV DNA release (77-95% decrease across different gRNAs), HBeAg secretion, and viral mRNA production (greater than 50%) (FIG. 62). MORE

[1244] Applicants next analyzed the effect of Cas9-mediated cleavage on the abundance of non-integrated viral forms, composed mainly of cccDNA. qPCR showed a robust reduction in total HBV DNA and in cccDNA, with the latter progressing from 71+/−7% reduction at day 21 to 92+/−4% at day 36 post transduction (FIGS. 63 and 64).

[1245] These results were confirmed by directly analyzing low molecular weight DNA from transduced cells by Southern blot (FIG. 65). cccDNA and its deproteinated relaxed circular form (dpRC DNA) precursor were greatly depleted in Cas9/gRNA transduced cells. In contrast, when total HBV DNA was analyzed, no substantial reduction in the levels of integrated HBV DNA was detected (FIG. 66). The Southern blot of HBV DNA at 29 days post transduction of FIG. 65 is the results of a Southern blot that was performed on the DNA harvested from the HepG2 2.15 cell lines at 29 dpt, either using standard DNA extraction for total DNA, or using a modified Hirt's extraction to specifically enrich for low molecular weight, non-chromosomal DNA. For Hirt's extraction, both total DNA and mtDNA are shown as loading controls since mtDNA should persist through the extraction procedure. Note the almost complete absence of HBV DNA in the on-target, nuclease-competent lanes. FIG. 65 shows that, with either high or low exposure, the rcDNA, cccDNA and ssDNA forms of HBV are essentially undetectable using guide 6 or 21, and (except for rcDNA) are barely detectable using 17. Then at day 36 linear dsDNA, cccDNA and ssDNA are essentially undetectable using 17 and 21, whereas levels of integrated HBV DNA remain unaffected (since Cas9-mediated cleavage of integrated DNA should result in NHEJ-mediated DNA repair and maintenance of the integrated HBV DNA although potentially in mutated form). This degree of reduction in HBV cccDNA (even in a cell line system) compares very favorably to the available literature on cccDNA-targeting HBV therapeutics.

[1246] The Southern blot of HBV DNA at 36 days post transduction of FIG. 66 is the results of a Southern blot was performed at 36 days post transduction, and specifically looks at differential effects on integrated HBV DNA vs. intermediate HBV forms and cccDNA. Note that on-target, nuclease-competent guides drastically reduce the levels of linear dsDNA, cccDNA, and ssDNA while levels of integrated HBV DNA remain unaffected (since Cas9-mediated cleavage of integrated DNA should result in NHEJ-mediated DNA repair and maintenance of the integrated HBV DNA, although potentially in mutated form). This degree of reduction in HBV cccDNA demonstrates that the CRISPR-Cas system can be a cccDNA-targeting HBV therapeutic.

[1247] Surveyor assay was performed on DNA extracts from CRISPR-transduced HepG2 2.15 cells to directly determine whether the viral DNA was cleaved and repaired via error-prone NHEJ similar to genomic targets of CRISPR/Cas9 and the results thereof are illustrated in FIG. 67. The Surveyor T7E1 endonuclease assay was performed to assess indel formation in HBV DNA in this system. Analysis of total HBV DNA forms for indel formation, an indirect measure of Cas9-mediated cleavage, revealed high levels of cutting (FIG. 67, top panel). Lower levels were seen in cccDNA that was amplified from the cells after DNAse treatment to destroy non-circular integrated HBV DNA (0% vs 32%, 62% vs 88% and 21% vs 66% for guides 21, 17 and 6, respectively) (FIG. 67, bottom panel).

[1248] Consistent with high levels of indel formation in the core ORF targeted by g17, immunostaining for HBV core protein (HBc) revealed a robust reduction in HBc levels in g17-expressing cells as compared to controls (FIG. 68).

[1249] To evaluate Cas9 treatment in a setting of de novo infection, Applicants used HepG2 cells overexpressing the HBV receptor NTCP (Hep-NTCP) (Yan H. et al. 2012), which are permissive to infection with HBV. Because g17 showed the highest levels of indel formation in cccDNA in the HepG2.2.15 experiments, these cells were transduced with Cas9/g17, Cas9/g17M, or dead Cas9/g17 lentiviruses, co-cultured with HBV producing HepG2.2.15 cells, and selected with puromycin to eliminate non-transduced Hep-NTCP and contaminating HepG2.2.15 cells (FIG. 69, left). Alternatively, Hep-NTCP cells were selected with puromycin following transduction and subsequently infected with HBV-positive patient serum (FIG. 69, right). When the transduced Hep-NTCP were infected with cell culture-produced virus, Cas9/g17 greatly abrogated productive HBV infection, as reflected by reduction in HBsAg and HBV DNA secretion, as well as 3.5 kb RNA and cccDNA levels, compared to controls (FIG. 70); this finding was confirmed following infection with patient-derived virus (FIG. 71). Surveyor assay performed using DNA from cells infected de novo with HepG2.2.15-derived virus confirmed direct cleavage of HBV episomal DNA (FIG. 72). Although minor cleavage was also detected in the mutated g17M, this most likely was due to low-level cleavage with DNA bulge-containing guide RNAs (Lin Y. et al. 2014). This finding provides direct evidence that Cas9 is capable of targeting episomal forms of the virus, and exerting anti-HBV effects by directly targeting cccDNA.

[1250] These experiments show that clearance of HBV cccDNA can be mediated by the expression of CRISPR-Cas constructs in cells either constitutively expressing or de novo transfected with HBV DNA. Given the high percentage of cccDNA+ hepatocytes in chronically HBV infected livers, it would be suitable to package the CRISPR-Cas system encompassing optimal HBV target sequences into a highly efficient, liver-specific vector such as adeno-associated virus, subtype 8 (AAV8) (Sands M S, “AAV-mediated liver-directed gene therapy,” Methods Mol Biol. 2011; 807:141-57. doi: 10.1007/978-1-61779-370-7_6). Additionally, to enforce the specificity or targeting and improve in vivo Cas9 expression, it will be desirable to include hepatocyte-specific transcriptional control regions (Miao C H et al, “Inclusion of the hepatic locus control region, an intron, and untranslated region increases and stabilizes hepatic factor IX gene expression in vivo but not in vitro,” Mol Ther 2000 June; 1 (6): 522-32). The dosing regimens would be optimized for both in vivo expression and prevention of an anti-AAV immune response, using information taken from the 100+ clinical trials that have been undertaken using AAV vectors (www.abedia.com/wiley/vectors.php). While incorporation of anti-HBV CRISPR-Cas systems into AAV vectors is still ongoing, the recent gene therapeutic success of other vector types, such as γ-retroviruses (Aiuti A et al, “Lentiviral Hematopoietic Stem Cell Gene Therapy in Patients with Wiskott-Aldrich Syndrome,” Science 341 no. 6148, 2013; Biffi A et al, “Lentiviral Hematopoietic Stem Cell Gene Therapy Benefits Metachromatic Leukodystrophy,” Science Vol. 341 no. 6148, 2013) opens up even more vector possibilities for human dosing, and provides a heightened level of comfort with using CRISPR-based gene therapy to excise HBV from infected hepatocytes.

[1251] Moreover, these experiments show that the CRISPR-Cas system can be used therapeutically to target and reduce the presence of HBV, especially cccDNA of HBV.

[1252] De novo HBV infection of in patient-derived hepatocytes (either primary human hepatocytes or iPS-derived hepatocytes) using the CRISPR-Cas system and constructs as herein described and illustrated obtain similar therapeutically significant results, especially because infection in these systems is performed with patient plasma-derived virus.

[1253] Cas9 cleavage of HBV cccDNA generates y-H2AX and Cas9 cleavage of HBV cccDNA linearizes the cccDNA which may be left unrepaired and potentially degraded after being linearized by Cas9.

[1254] Yan et al, eLife (2012) identified a specific 2-48aa sequence in the PreS1 protein of HBV responsible for binding to the sodium taurocholate cotransporting polypeptide (NTCP), the recently discovered receptor for HBV. Targeting sgRNAs against this region may induce indel formation and mutation of this region may result in the production of virions incapable of binding and entering new hepatocytes, leading to another mechanism of viral clearance even if all cccDNA cannot be eliminated.

[1255] Moreover, the results herein invite co-administration of CRISPR/Cas system and epigenetic modifier drugs: The HBV cccDNA ‘minichromosome” is a very densely-packed, nucleosome-associated structure with HBV DNA tightly coiled around histone proteins and HBV Core protein (HBc), leading to nucleosomal spacing even shorter than standard chromosomal spacing. HBV transcription are regulated by epigenetic marks on associated histones, which lead to the recruitment of several host cellular transcription factors, and epigenetic modification of cccDNA minichromosomes has shown some promise in reducing the transcription of HBV RNAs and also in leading to cccDNA degradation (for example, IFN-alpha's cccDNA degrading ability may be related to induction of epigenetic changes on the cccDNA). Since Cas9 targeting to cccDNA is likely at least partially dependent on the cccDNA structure, co-treatment with epigenetic modifiers (for example Class I and Class III HDAC inhibitors trichostatin A (TSA), valproate, and nicotinamide (NAM), and Type I interferons) may be a valuable strategy for increasing Cas9 occupancy on HBV cccDNA. The invention comprehends administration of the CRISPR-Cas system with such epigenetic modifier drugs; or other drugs presently used to treat HBV. The skilled person can use doses and formulations of such drugs presently used, in combination with the CRISPR-Cas system in doses and formulations as herein described to treat HBV.

### Example 29: Other Viruses

[1256] Other viruses can also be targeted using the same approach, and in particular DNA viruses (typically dsDNA viruses). For example, herpes simplex virus (HSV), human papillomavirus (HPV), Epstein Barr virus (EBV), varicella zoster virus (VZV), and any other virus which integrates into a host mammal's genome and/or has a latent circular episomsal form. CRISPR systems of the invention can be targeted to cell types which maintain the latent virus e.g. B cells or epithelial cells for EBV, neurons for HSV and VZV, epithelial cells for HPV, etc.

[1257] HSV1/2 forms stable latent infection phase in neurons in episomal form, and the latent DNA is (similar to HBV) complexed with nucleosomes and other transcription-regulating machinery. There are AAV subtypes (AAV2) which efficiently target neurons, and this is a good target. HPV has a low copy-number, episomal DNA form in basal keratinocytes, activation of replication as differentiation occurs into the squamous layer; targeting these cells is relatively easy since mucosal sites are accessible, and if done early after detection, viral dissemination could be halted by using a CRISPR-Cas system as herein discussed. Plant viruses are also suitable targets. Accordingly, the herein studies as to HBV are readily extendable to other mammalian or human viruses and plant viruses.

### REFERENCES

[1258] Banker G, Goslin K. Developments in neuronal cell culture. Nature. 1988 Nov. 10; 336 (6195): 185-6.
[1259] Bedell, V. M. et al. In vivo genome editing using a high-efficiency TALEN system. Nature 491, 114-U133 (2012).
[1260] Bhaya, D., Davison, M. & Barrangou, R. CRISPR-Cas systems in bacteria and archaea: versatile small RNAs for adaptive defense and regulation. Annu Rev Genet 45, 273-297 (2011).
[1261] Bobis-Wozowicz, S., Osiak, A., Rahman, S. H. & Cathomen, T. Targeted genome editing in pluripotent stem cells using zinc-finger nucleases. Methods 53, 339-346 (2011).
[1262] Boch, J. et al. Breaking the code of DNA binding specificity of TAL-type III effectors. Science 326, 1509-1512 (2009).
[1263] Bogenhagen, D. F. & Brown, D. D. Nucleotide sequences in Xenopus 5S DNA required for transcription termination. Cell 24, 261-270 (1981).
[1264] Bultmann, S. et al. Targeted transcriptional activation of silent oct4 pluripotency gene by combining designer TALEs and inhibition of epigenetic modifiers. Nucleic Acids Res 40, 5368-5377 (2012).
[1265] Carlson, D. F. et al. Efficient TALEN-mediated gene knockout in livestock. Proc Natl Acad Sci USA 109, 17382-17387 (2012).
[1266] Chen, F. Q. et al. High-frequency genome editing using ssDNA oligonucleotides with zinc-finger nucleases. Nat Methods 8, 753-U796 (2011).
[1267] Cho, S. W., Kim, S., Kim, J. M. & Kim, J. S. Targeted genome engineering in human cells with the Cas9 RNA-guided endonuclease. Nat Biotechnol 31, 230-232 (2013).
[1268] Christian, M. et al. Targeting DNA double-strand breaks with TAL effector nucleases. Genetics 186, 757-761 (2010).
[1269] Cohen, D et al., Hepatitis B virus activates deoxynucleotide synthesis in nondividing hepatocytes by targeting the R2 gene. Hepatology 51, 1538-1546 (2010).
[1270] Cong, L. et al. Multiplex genome engineering using CRISPR-Cas systems. Science 339, 819-823 (2013).
[1271] Deltcheva, E. et al. CRISPR RNA maturation by trans-encoded small RNA and host factor RNase III. Nature 471, 602-607 (2011).
[1272] Deveau, H., Garneau, J. E. & Moineau, S. CRISPR-Cas system and its role in phage-bacteria interactions. Annu Rev Microbiol 64, 475-493 (2010).
[1273] Ding, Q. et al. A TALEN genome-editing system for generating human stem cell-based disease models. Cell Stem Cell 12, 238-251 (2013).
[1274] Garneau, J. E. et al. The CRISPR-Cas bacterial immune system cleaves bacteriophage and plasmid DNA. Nature 468, 67-71 (2010).
[1275] Gasiunas, G., Barrangou, R., Horvath, P. & Siksnys, V. Cas9-crRNA ribonucleoprotein complex mediates specific DNA cleavage for adaptive immunity in bacteria. Proc Natl Acad Sci USA 109, E2579-2586 (2012).
[1276] Geurts, A. M. et al. Knockout Rats via Embryo Microinjection of Zinc-Finger Nucleases. Science 325, 433-433 (2009).
[1277] Glebe D. et al., Pre-S1 Antigen-Dependent Infection of Tupaia Hepatocyte Cultures with Human Hepatitis B Virus. Journal of Virology 77, 9511-9521 (2003).
[1278] Gray S J, Foti S B, Schwartz J W, Bachaboina L, Taylor-Blake B, Coleman J, Ehlers M D, Zylka M J, McCown T J, Samulski R J. Optimizing promoters for recombinant adeno-associated virus-mediated gene expression in the peripheral and central nervous system using self-complementary vectors. Hum Gene Ther. 2011 September; 22 (9): 1143-53. doi: 10.1089/hum.2010.245.
[1279] Guschin, D. Y. et al. A rapid and general assay for monitoring endogenous gene modification. Methods Mol Biol 649, 247-256 (2010).
[1280] Hasty, P., Rivera-Perez, J. & Bradley, A. The length of homology required for gene targeting in embryonic stem cells. Mol Cell Biol 11, 5586-5591 (1991).
[1281] Horvath, P. & Barrangou, R. CRISPR-Cas, the immune system of bacteria and archaea. Science 327, 167-170 (2010).
[1282] Hsu, P. D. & Zhang, F. Dissecting neural function using targeted genome engineering technologies. ACS Chem Neurosci 3, 603-610 (2012).
[1283] Hwang, W. Y. et al. Efficient genome editing in zebrafish using a CRISPR-Cas system. Nat Biotechnol 31, 227-229 (2013).
[1284] Jiang, W., Bikard, D., Cox, D., Zhang, F. & Marraffini, L. A. RNA-guided editing of bacterial genomes using CRISPR-Cas systems. Nat Biotechnol 31, 233-239 (2013).
[1285] Jinek, M. et al. A programmable dual-RNA-guided DNA endonuclease in adaptive bacterial immunity. Science 337, 816-821 (2012).
[1286] Jinek, M. et al. RNA-programmed genome editing in human cells. eLife 2, e00471 (2013).
[1287] Kaplitt, M. G., et al., Safety and tolerability of gene therapy with an adeno-associated virus (AAV) bome GAD gene for Parkinson's disease: an open label, phase I trial. Lancet. 2007 Jun. 23; 369 (9579): 2097-105.
[1288] Levitt N. Briggs D. Gil A. Proudfoot N.J. Definition of an efficient synthetic poly(A) site. Genes Dev. 1989; 3:1019-1025.
[1289] Lewis, D. L. et al. Delivery of siRNA and siRNA expression constructs to adult mammals by hydrodynamic intravascular injection. Methods Enzymol. 392, 336-350 (2005).
[1290] Lin Y. et al. CRISPR/Cas9 systems have off-target activity with insertions or deletions between target DNA and guide RNA sequences. Nucleic Acids Research 42, 7473-7485 (2014).
[1291] Liu D, Fischer I. Two alternative promoters direct neuron-specific expression of the rat microtubule-associated protein 1B gene. J Neurosci. 1996 Aug. 15; 16 (16): 5026-36.
[1292] Lopes, V. S., etc al., Retinal gene therapy with a large MYO7A cDNA using adeno-assocaited virus. Gene Ther, 2013 Jan. 24. doi: 10.1038/gt 2013.3. [Epub ahead of print]
[1293] Mahfouz, M. M. et al. De novo-engineered transcription activator-like effector (TALE) hybrid nuclease with novel DNA binding specificity creates double-strand breaks. Proc Natl Acad Sci USA 108, 2623-2628 (2011).
[1294] Makarova, K. S. et al. Evolution and classification of the CRISPR-Cas systems. Nat Rev Microbiol 9, 467-477 (2011).
[1295] Mali, P. et al. RNA-guided human genome engineering via Cas9. Science 339, 823-826 (2013).
[1296] McClure C, Cole K L, Wulff P, Klugmann M, Murray A J. Production and titering of recombinant adeno-associated viral vectors. J Vis Exp. 2011 Nov. 27; (57): e3348. doi: 10.3791/3348.
[1297] Michaelis, L. M., Maud “Die kinetik der invertinwirkung.”. Biochem. z (1913).
[1298] Miller, J. C. et al. An improved zinc-finger nuclease architecture for highly specific genome editing. Nat Biotechnol 25, 778-785 (2007).
[1299] Miller, J. C. et al. A TALE nuclease architecture for efficient genome editing. Nat Biotechnol 29, 143-148 (2011).
[1300] Moscou, M. J. & Bogdanove, A. J. A simple cipher governs DNA recognition by TAL effectors. Science 326, 1501 (2009). Porteus, M. H. & Baltimore, D. Chimeric nucleases stimulate gene targeting in human cells. Science 300, 763 (2003).
[1301] Mussolino, C. et al. A novel TALE nuclease scaffold enables high genome editing activity in combination with low toxicity. Nucleic acids research 39, 9283-9293 (2011).
[1302] Nathwani, A. C., et al., Adenovirus-associated virus vector-mediated gene transfer in hemophilia B. N Engl J Med. 2011 Dec. 22; 365 (25): 2357-65. doi: 10.1056/NEJMoa1108046. Epub 2011 Dec. 10.
[1303] Oliveira, T. Y. et al. Translocation capture sequencing: a method for high throughput mapping of chromosomal rearrangements. J Immunol Methods 375, 176-181 (2012).
[1304] Perez, E. E. et al. Establishment of HIV-1 resistance in CD4 (+) T cells by genome editing using zinc-finger nucleases. Nat Biotechnol 26, 808-816 (2008).
[1305] Qi, L. S. et al. Repurposing CRISPR as an RNA-guided platform for sequence-specific control of gene expression. Cell 152, 1173-1183 (2013).
[1306] REMINGTON'S PHARMACEUTICAL SCIENCES (Mack Pub. Co., N. J. 1991)
[1307] Reyon, D. et al. FLASH assembly of TALENs for high-throughput genome editing. Nat Biotechnol 30, 460-465 (2012).
[1308] Saleh-Gohari, N. & Helleday, T. Conservative homologous recombination preferentially repairs DNA double-strand breaks in the S phase of the cell cycle in human cells. Nucleic Acids Res 32, 3683-3688 (2004).
[1309] Sander, J. D. et al. Selection-free zinc-finger-nuclease engineering by context-dependent assembly (CoDA). Nat Methods 8, 67-69 (2011).
[1310] Sanjana, N. E. et al. A transcription activator-like effector toolbox for genome engineering. Nat Protoc 7, 171-192 (2012).
[1311] Sapranauskas, R. et al. The Streptococcus thermophilus CRISPR-Cas system provides immunity in Escherichia coli. Nucleic Acids Res 39, 9275-9282 (2011).
[1312] Shen, B. et al. Generation of gene-modified mice via Cas9/RNA-mediated gene targeting. Cell Res 23, 720-723 (2013).
[1313] Smithies, O., Gregg, R. G., Boggs, S. S., Koralewski, M. A. & Kucherlapati, R. S. Insertion of DNA sequences into the human chromosomal beta-globin locus by homologous recombination. Nature 317, 230-234 (1985).
[1314] Soldner, F. et al. Generation of isogenic pluripotent stem cells differing exclusively at two early onset Parkinson point mutations. Cell 146, 318-331 (2011).
[1315] Takasu, Y. et al. Targeted mutagenesis in the silkworm Bombyx mori using zinc finger nuclease mRNA injection. Insect Biochem Molec 40, 759-765 (2010).
[1316] Tangri S, et al., Rationally engineered therapeutic proteins with reduced immunogenicity, J Immunol. 2005 Mar. 15; 174 (6): 3187-96.
[1317] Thomas, K. R., Folger, K. R. & Capecchi, M. R. High frequency targeting of genes to specific sites in the mammalian genome. Cell 44, 419-428 (1986).
[1318] Tuschl, T. Expanding small RNA interference. Nat Biotechnol 20, 446-448 (2002).
[1319] Urnov, F. D., Rebar, E. J., Holmes, M. C., Zhang, H. S. & Gregory, P. D. Genome editing with engineered zinc finger nucleases. Nat Rev Genet 11, 636-646 (2010).
[1320] Valton, J. et al. Overcoming transcription activator-like effector (TALE) DNA binding domain sensitivity to cytosine methylation. J Biol Chem 287, 38427-38432 (2012).
[1321] Wang, H. et al. One-Step Generation of Mice Carrying Mutations in Multiple Genes by CRISPR-Cas-Mediated Genome Engineering. Cell 153, 910-918 (2013).
[1322] Watanabe, T. et al. Non-transgenic genome modifications in a hemimetabolous insect using zinc-finger and TAL effector nucleases. Nat Commun 3 (2012).
[1323] Wilson, E. B. Probable inference, the law of succession, and statistical inference. J Am Stat Assoc 22, 209-212 (1927).
[1324] Wood, A. J. et al. Targeted genome editing across species using ZFNs and TALENs. Science 333, 307 (2011).
[1325] Wu, S., Ying, G. X., Wu, Q. & Capecchi, M. R. A protocol for constructing gene targeting vectors: generating knockout mice for the cadherin family and beyond. Nat Protoc 3, 1056-1076 (2008).
[1326] Yan H. et al. Sodium taurocholate cotransporting polypeptide is a functional receptor for human hepatitis B and D virus. eLife 1, (2012).
[1327] Zhang, F. et al. Efficient construction of sequence-specific TAL effectors for modulating mammalian transcription. Nat Biotechnol 29, 149-153 (2011).

[1328] The invention is further described by the following numbered paragraphs:

[1329] A method of modifying an organism or a non-human organism by manipulation of a target hepatitis B virus (HBV) sequence in a genomic locus of interest comprising delivering a non-naturally occurring or engineered composition comprising:
[1330] A)—I. a CRISPR-Cas system RNA polynucleotide sequence, wherein the polynucleotide sequence comprises:
   [1331] (a) a guide sequence capable of hybridizing to a target HBV sequence in a eukaryotic cell,
   [1332] (b) a tracr mate sequence, and
   [1333] (c) a tracr sequence, and
[1334] II. a polynucleotide sequence encoding a CRISPR enzyme, optionally comprising at least one or more nuclear localization sequences,
[1335] wherein (a), (b) and (c) are arranged in a 5′ to 3′ orientation,
[1336] wherein when transcribed, the tracr mate sequence hybridizes to the tracr sequence and the guide sequence directs sequence-specific binding of a CRISPR complex to the target HBV sequence, and
[1337] wherein the CRISPR complex comprises the CRISPR enzyme complexed with (1) the guide sequence that is hybridized or hybridizable to the target HBV sequence, and (2) the tracr mate sequence that is hybridized or hybridizable to the tracr sequence and the polynucleotide sequence encoding a CRISPR enzyme is DNA or RNA,
[1338] or
[1339] (B) I. polynucleotides comprising:
   [1340] (a) a guide sequence capable of hybridizing to a target HBV sequence in a eukaryotic cell, and
   [1341] (b) at least one or more tracr mate sequences,
[1342] II. a polynucleotide sequence encoding a CRISPR enzyme, and
[1343] III. a polynucleotide sequence comprising a tracr sequence,
[1344] wherein when transcribed, the tracr mate sequence hybridizes to the tracr sequence and the guide sequence directs sequence-specific binding of a CRISPR complex to the target HBV sequence, and
[1345] wherein the CRISPR complex comprises the CRISPR enzyme complexed with (1) the guide sequence that is hybridized or hybridizable to the target HBV sequence, and (2) the tracr mate sequence that is hybridized or hybridizable to the tracr sequence, and the polynucleotide sequence encoding a CRISPR enzyme is DNA or RNA.

[1346] 2. The method of paragraph 1, wherein any or all of the polynucleotide sequence encoding a CRISPR enzyme, guide sequence, tracr mate sequence or tracr sequence, is/are RNA.

[1347] 3. The method of paragraph 1 or 2, wherein the polynucleotides encoding the sequence encoding a CRISPR enzyme, the guide sequence, tracr mate sequence or tracr sequence is/are RNA and are delivered via liposomes, nanoparticles, exosomes, microvesicles, or a gene-gun.

[1348] 4. The method of any of paragraphs 1 to 3, wherein the polynucleotides are comprised within a vector system comprising one or more vectors.

[1349] 5. A method of modifying an organism or a non-human organism by manipulation of a target HBV sequence in a genomic locus of interest comprising delivering a non-naturally occurring or engineered composition comprising a viral vector system comprising one or more viral vectors operably encoding a composition for expression thereof, wherein the composition comprises:
[1350] (A) a non-naturally occurring or engineered composition comprising a vector system comprising one or more vectors comprising
   [1351] I. a first regulatory element operably linked to a CRISPR-Cas system RNA polynucleotide sequence, wherein the polynucleotide sequence comprises
      [1352] (a) a guide sequence capable of hybridizing to a target HBV sequence in a eukaryotic cell,
      [1353] (b) a tracr mate sequence, and
      [1354] (c) a tracr sequence, and
   [1355] II. a second regulatory element operably linked to an enzyme-coding sequence encoding a CRISPR enzyme, optionally comprising at least one or more nuclear localization sequences,
[1356] wherein (a), (b) and (c) are arranged in a 5′ to 3′ orientation,
[1357] wherein components I and II are located on the same or different vectors of the system,
[1358] wherein when transcribed, the tracr mate sequence hybridizes to the tracr sequence and the guide sequence directs sequence-specific binding of a CRISPR complex to the target HBV sequence, and
[1359] wherein the CRISPR complex comprises the CRISPR enzyme complexed with (1) the guide sequence that is hybridized or hybridizable to the target HBV sequence, and (2) the tracr mate sequence that is hybridized or hybridizable to the tracr sequence,
[1360] or
[1361] (B) a non-naturally occurring or engineered composition comprising a vector system comprising one or more vectors comprising
   [1362] I. a first regulatory element operably linked to
      [1363] (a) a guide sequence capable of hybridizing to a target HBV sequence in a eukaryotic cell, and
      [1364] (b) at least one or more tracr mate sequences,
   [1365] II. a second regulatory element operably linked to an enzyme-coding sequence encoding a CRISPR enzyme, and
   [1366] III. a third regulatory element operably linked to a tracr sequence,
[1367] wherein components I, II and III are located on the same or different vectors of the system,
[1368] wherein when transcribed, the tracr mate sequence hybridizes to the tracr sequence and the guide sequence directs sequence-specific binding of a CRISPR complex to the target HBV sequence, and
[1369] wherein the CRISPR complex comprises the CRISPR enzyme complexed with (1) the guide sequence that is hybridized or hybridizable to the target HBV sequence, and (2) the tracr mate sequence that is hybridized or hybridizable to the tracr sequence.

[1370] 6. The method of paragraph 5, wherein one or more of the viral vectors are delivered via liposomes, nanoparticles, exosomes, microvesicles, or a gene-gun.

[1371] 7. A method of treating or inhibiting a condition caused by a defect in a target HBV sequence in a genomic locus of interest in a subject or a non-human subject in need thereof comprising modifying the subject or a non-human subject by manipulation of the target HBV sequence and wherein the condition is susceptible to treatment or inhibition by manipulation of the target HBV sequence comprising providing treatment comprising:
[1372] delivering a non-naturally occurring or engineered composition comprising an AAV or lentivirus vector system, comprising one or more AAV or lentivirus vectors operably encoding a composition for expression thereof, wherein the target HBV sequence is manipulated by the composition when expressed, wherein the composition comprises:
[1373] (A) a non-naturally occurring or engineered composition comprising a vector system comprising one or more vectors comprising
   [1374] I. a first regulatory element operably linked to a CRISPR-Cas system RNA polynucleotide sequence, wherein the polynucleotide sequence comprises
      [1375] (a) a guide sequence capable of hybridizing to a target HBV sequence in a eukaryotic cell,
      [1376] (b) a tracr mate sequence, and
      [1377] (c) a tracr sequence, and
   [1378] II. a second regulatory element operably linked to an enzyme-coding sequence encoding a CRISPR enzyme comprising at least one or more nuclear localization sequences,
[1379] wherein (a), (b) and (c) are arranged in a 5′ to 3′ orientation,
[1380] wherein components I and II are located on the same or different vectors of the system, wherein when transcribed, the tracr mate sequence hybridizes to the tracr sequence and the guide sequence directs sequence-specific binding of a CRISPR complex to the target HBV sequence, and
[1381] wherein the CRISPR complex comprises the CRISPR enzyme complexed with (1) the guide sequence that is hybridized or hybridizable to the target HBV sequence, and (2) the tracr mate sequence that is hybridized or hybridizable to the tracr sequence,
[1382] or
[1383] (B) a non-naturally occurring or engineered composition comprising a vector system comprising one or more vectors comprising
   [1384] I. a first regulatory element operably linked to
      [1385] (a) a guide sequence capable of hybridizing to a target HBV sequence in a eukaryotic cell, and
      [1386] (b) at least one or more tracr mate sequences,
   [1387] II. a second regulatory element operably linked to an enzyme-coding sequence encoding a CRISPR enzyme, and
   [1388] III. a third regulatory element operably linked to a tracr sequence,
[1389] wherein components I, II and III are located on the same or different vectors of the system,
[1390] wherein when transcribed, the tracr mate sequence hybridizes to the tracr sequence and the guide sequence directs sequence-specific binding of a CRISPR complex to the target HBV sequence, and
[1391] wherein the CRISPR complex comprises the CRISPR enzyme complexed with (1) the guide sequence that is hybridized or hybridizable to the target HBV sequence, and (2) the tracr mate sequence that is hybridized or hybridizable to the tracr sequence.

[1392] 8. The method of any preceding claim, wherein the method is carried out in vitro, and/or ex vivo.

[1393] 9. The method of any preceding claim including inducing expression.

[1394] 10. The method of any preceding claim wherein the organism or subject is a eukaryote, preferably a non-human eukaryote.

[1395] 11. The method of paragraph 10 wherein the organism or subject is a non-human eukaryote.

[1396] 12. The method of any of paragraphs 1 to 11 wherein the organism or subject is a mammal or a non-human mammal.

[1397] 13. The method of any of paragraphs 4 to 8 wherein the viral vector is an AAV or lentiviral vector.

[1398] 14. The method according to any preceding claim wherein the CRISPR enzyme is a Cas9.

[1399] 15. The method according to any preceding claim wherein expression of the guide sequence is under the control of the T7 promoter and is driven by the expression of T7 polymerase.

[1400] 16. A method of delivering a CRISPR enzyme of any preceding claim, comprising delivering to a cell mRNA encoding the CRISPR enzyme.

[1401] 17. The method of any one of paragraphs 1 to 16, wherein the polynucleotide or enzyme coding sequence encoding the CRISPR enzyme is delivered to the cell by delivering mRNA encoding the CRISPR enzyme to the cell.

[1402] 18. A method of preparing the AAV or lentivirus vector of paragraph 7 comprising transfecting plasmid(s) containing or consisting essentially of nucleic acid molecule(s) coding for the AAV or lentivirus into AAV-infected or lentivirus-infected cells, and supplying AAV AAV or lentivirus rep and/or cap and/or helper nucleic acid molecules obligatory for replication and packaging of the AAV or lentivirus.

[1403] 19. A method of preparing an AAV or lentivirus vector for use in the method of paragraph 7, comprising transfecting plasmid(s) containing or consisting essentially of nucleic acid molecule(s) coding for the AAV or lentivirus into AAV-infected or lentivirus-infected cells, and supplying AAV AAV or lentivirus rep and/or cap and/or helper nucleic acid molecules obligatory for replication and packaging of the AAV or lentivirus.

[1404] 20. The method of paragraph 18 or 19 wherein the AAV or lentivirus rep and/or cap obligatory for replication and packaging of the AAV or lentivirus are supplied by transfecting the cells with helper plasmid(s) or helper virus(es).

[1405] 21. The method of paragraph 20 wherein the helper virus is a poxvirus, adenovirus, lentivirus, herpesvirus or baculovirus.

[1406] 22. The method of paragraph 21 wherein the poxvirus is a vaccinia virus.

[1407] 23. The method of any of paragraphs 18 to 22 wherein the cells are mammalian cells.

[1408] 24. The method of any of paragraphs 18 to 22 wherein the cells are insect cells and the helper virus (where present) is baculovirus.

[1409] 25. The method of any of paragraphs 1 to 15 wherein the target HBV sequence is flanked at its 3′ end or followed by 5′-NRG (where N is any Nucleotide), and where the CRISPR enzyme is (or is derived from) S. pyogenes or S. aureus Cas9.

[1410] 26. A composition as defined in any of paragraphs 1-25 for use in medicine or in therapy.

[1411] 27. A composition as defined in any of paragraphs 1-25 for use in a method of modifying an organism or a non-human organism by manipulation of a target HBV sequence in a genomic locus of interest or in a method of treating or inhibiting a condition caused by a defect in a target HBV sequence in a genomic locus of interest.

[1412] 28. Use of a composition as defined in any of paragraphs 1-25 in ex vivo gene or genome editing.

[1413] 29. Use of a composition as defined in any of paragraphs 1-25 in the manufacture of a medicament for ex vivo gene or genome editing or for use in a method of modifying an organism or a non-human organism by manipulation of a target HBV sequence in a genomic locus of interest or in a method of treating or inhibiting a condition caused by a defect in a target HBV sequence in a genomic locus of interest.

[1414] 30. A composition comprising:
[1415] A)—I. a CRISPR-Cas system RNA polynucleotide sequence, wherein the polynucleotide sequence comprises:
   [1416] (a) a guide sequence capable of hybridizing to a target HBV sequence in a eukaryotic cell,
   [1417] (b) a tracr mate sequence, and
   [1418] (c) a tracr sequence, and
[1419] II. a polynucleotide sequence encoding a CRISPR enzyme, optionally comprising at least one or more nuclear localization sequences,
[1420] wherein (a), (b) and (c) are arranged in a 5′ to 3′ orientation,
[1421] wherein when transcribed, the tracr mate sequence hybridizes to the tracr sequence and the guide sequence directs sequence-specific binding of a CRISPR complex to the target HBV sequence, and
[1422] wherein the CRISPR complex comprises the CRISPR enzyme complexed with (1) the guide sequence that is hybridized or hybridizable to the target HBV sequence, and (2) the tracr mate sequence that is hybridized or hybridizable to the tracr sequence and the polynucleotide sequence encoding a CRISPR enzyme is DNA or RNA,
[1423] or
[1424] (B) I. polynucleotides comprising:
   [1425] (a) a guide sequence capable of hybridizing to a target HBV sequence in a eukaryotic cell, and
   [1426] (b) at least one or more tracr mate sequences,
[1427] II. a polynucleotide sequence encoding a CRISPR enzyme, and
[1428] III. a polynucleotide sequence comprising a tracr sequence,
[1429] wherein when transcribed, the tracr mate sequence hybridizes to the tracr sequence and the guide sequence directs sequence-specific binding of a CRISPR complex to the target hepatitis B virus (HBV) sequence, and
[1430] wherein the CRISPR complex comprises the CRISPR enzyme complexed with (1) the guide sequence that is hybridized or hybridizable to the target HBV sequence, and (2) the tracr mate sequence that is hybridized or hybridizable to the tracr sequence, and the polynucleotide sequence encoding a CRISPR enzyme is DNA or RNA;
[1431] for use in medicine or therapy; or for use in a method of modifying an organism or a non-human organism by manipulation of a target HBV sequence in a genomic locus of interest; or for use in a method of treating or inhibiting a condition caused by a defect in a target HBV sequence in a genomic locus of interest; or for use in ex vivo gene or genome editing.

[1432] 31. The composition of claim 30, wherein the polynucleotides are comprised within a vector system comprising one or more vectors.

[1433] 32. The method, use or composition of any of the preceding claims, wherein the CRISPR-Cas system RNA is a chimeric RNA (chiRNA).

[1434] 33. The method, use or composition of any of the preceding claims, wherein the CRISPR-Cas system is a multiplexed CRISPR enzyme system further comprising multiple chimeras and/or multiple multiguide sequences and a single tracr sequence.

[1435] 34. The method, use or composition according any of the preceding claims, wherein the CRISPR enzyme is a nuclease directing cleavage of one or both strands at the location of the target sequence.

[1436] 35. The method, use or composition according to any of the preceding claims, wherein the CRISPR enzyme comprises one or more mutations.

[1437] 36. The method, use or composition according to paragraph 35, wherein the CRISPR enzyme comprises one or more mutations D10A, E762A, H840A, N854A, N863A or D986A.

[1438] 37. The method, use or composition according to paragraph 35 wherein the one or more mutations is in a RuvC1 domain of the CRISPR enzyme.

[1439] 38. The method, use or composition according to paragraph 34, wherein the CRISPR enzyme is a nickase directing cleavage at the location of the target sequence.

[1440] 39. The method, use or composition according to paragraph 38, wherein the nickase is a double nickase.

[1441] 40. The method, use or composition according to any preceding claim further comprising at least two or more NLS.

[1442] 41. The method, use or composition according to any preceding claim, wherein the CRISPR enzyme has one or more mutations in a catalytic domain, wherein when transcribed, the tracr mate sequence hybridizes to the tracr sequence and the guide sequence directs sequence-specific binding of a CRISPR complex to the target sequence, and wherein the enzyme further comprises a functional domain.

[1443] 42. The method, use or composition according to paragraph 41, wherein the functional domain is a transcriptional activation domain.

[1444] 43. The method, use or composition according to paragraph 42, wherein the transcriptional activation domain is VP64.

[1445] 44. The method of any one of paragraphs 1-25 or 32-43 further comprising minimizing off-target modifications by manipulation of a first and a second target sequence on opposite strands of a DNA duplex in a genomic locus of interest in a cell comprising
[1446] delivering a non-naturally occurring or engineered composition comprising:
   [1447] I. a CRISPR-Cas system chimeric RNA (chiRNA) polynucleotide sequence, wherein the polynucleotide sequence comprises:
      [1448] (a) a first guide sequence capable of hybridizing to the first target sequence,
      [1449] (b) a first tracr mate sequence,
      [1450] (c) a first tracr sequence,
      [1451] (d) a second guide sequence capable of hybridizing to the second target sequence,
      [1452] (e) a second tracr mate sequence, and
      [1453] (f) a second tracr sequence, and
[1454] optionally, wherein a linker sequence is present between the first tracr sequence and the second guide sequence, whereby the first guide sequence and the second guide sequence are in tandem; and
   [1455] II. a polynucleotide sequence encoding a CRISPR enzyme comprising at least one or more nuclear localization sequences, wherein (a), (b), (c), (d), (e) and (f) are arranged in a 5′ to 3′ orientation, wherein the polynucleotide sequence comprises a linker sequence between the first tracr sequence and the second guide sequence, whereby the first guide sequence and the second guide sequence are in tandem, and wherein when transcribed, the first and the second tracr mate sequence hybridize to the first and second tracr sequence respectively and the first and the second guide sequence directs sequence-specific binding of a first and a second CRISPR complex to the first and second target sequences respectively,
[1456] or
   [1457] II. a second regulatory element operably linked to an enzyme-coding sequence encoding a CRISPR enzyme, and wherein components I and II are located on the same or different vectors of the system, and when transcribed, a first tracr mate sequence hybridizes to a first tracr sequence and the first and the second guide sequence directs sequence-specific binding of a first and a second CRISPR complex to the first and second target sequences respectively;
[1458] wherein the first CRISPR complex comprises the CRISPR enzyme complexed with (1) the first guide sequence that is hybridized or hybridizable to the first target sequence, and (2) the first tracr mate sequence that is hybridized or hybridizable to the first tracr sequence,
[1459] wherein the second CRISPR complex comprises the CRISPR enzyme complexed with (1) the second guide sequence that is hybridized or hybridizable to the second target sequence, and (2) the second tracr mate sequence that is hybridized or hybridizable to the second tracr sequence,
[1460] wherein the polynucleotide sequence encoding a CRISPR enzyme is DNA or RNA, and
[1461] wherein the first guide sequence directs cleavage of one strand of the DNA duplex near the first target sequence and the second guide sequence directs cleavage of other strand near the second target sequence inducing a double strand break, thereby modifying the organism or the non-human organism by minimizing off-target modifications.

[1462] 45. A CRISPR-Cas system comprising one or more vectors for delivery to a eukaryotic cell, wherein the vector(s) encode(s): (i) a CRISPR enzyme; (ii) a guide RNA capable of hybridizing to a target sequence in a viral genome within the cell; and (iii); a tracr mate sequence; and (iv) a tracr sequence,
[1463] wherein, when expressed within the cell, the guide RNA directs sequence-specific binding of a CRISPR complex to the target sequence, and the CRISPR complex comprises
[1464] (a) the tracr mate sequence hybridised to the tracr sequence and (b) a CRISPR enzyme bound to the guide RNA, such that the guide RNA can hybridise to its target sequence in the viral genome.

[1465] 46. The system of paragraph 45 wherein the viral genome is hepatitis B virus (HBV), herpes simplex virus (HSV), human papillomavirus (HPV), Epstein Barr virus (EBV), varicella zoster virus (VZV) or a plant virus.

[1466] 47. The system of paragraph 46 wherein the viral genome is HBV.

[1467] 48. A method of treating a viral infection in an individual in need thereof comprising administering an effective amount of the system of paragraph 45.

[1468] 49. The method of paragraph 48 wherein the viral infection is HBV.

[1469] 50. The method of paragraph 49 including administering an additional HBV treatment.

[1470] 57. The method of paragraph 50 wherein the additional treatment comprises an epigenetic modifier.

[1471] 52. Use of the system of any one of paragraphs 45-47 in treating a viral infection of an individual or in formulating a medicament or pharmaceutical composition or treatment regimen for viral infection treatment.

[1472] 53. A method of modifying a cell of a eukaryotic organism by manipulating at least one target viral nucleic acid within the cell, the method comprising introducing into the cell an exogenous composition capable of forming a Clustered Regularly Interspersed Short Palindromic Repeats (CRISPR)-CRISPR-associated (Cas) (CRISPR-Cas) complex, the composition comprising:
[1473] (A) CRISPR-Cas system polynucleotide sequences comprising:
   [1474] (i) a guide sequence, which when transcribed is capable of hybridizing to a sequence of the at least one target viral nucleic acid to be manipulated;
   [1475] (ii) a trans-activating CRISPR RNA (tracr) mate sequence, which is linked to the guide sequence; and
   [1476] (iii) a tracr sequence, wherein when transcribed all or a portion of the tracr sequence is capable of hybridizing to the tracr mate sequence; and
[1477] (B) a CRISPR/Cas enzyme or a polynucleotide encoding a CRISPR/Cas enzyme,
[1478] wherein when the CRISPR/Cas system polynucleotide sequences are present as RNA within the cell and the CRISPR/Cas enzyme is present as a protein within the cell:
   [1479] (i) the tracr mate sequence is hybridized to the tracr sequence or portion thereof;
   [1480] (ii) the CRISPR/Cas system polynucleotide sequences are associated with the CRISPR/Cas enzyme, so forming a CRISPR/Cas complex; and
   [1481] (iii) the guide sequence hybridizes to a sequence of the at least one target viral nucleic acid thereby directing sequence-specific binding of the CRISPR/Cas complex to the at least one sequence of the target viral nucleic acid, whereupon said sequence of said target viral nucleic acid is manipulated by the CRISPR/Cas enzyme of the complex.

[1482] 54. An exogenous composition which, when introduced into a cell of a eukaryotic organism, is capable of forming at least one Clustered Regularly Interspersed Short Palindromic Repeats (CRISPR)-CRISPR-associated (Cas) (CRISPR-Cas) complex, wherein the complex is capable of modifying the cell by manipulating at least one target viral nucleic acid within the cell, the composition comprising:
[1483] (A) Clustered Regularly Interspersed Short Palindromic Repeats (CRISPR)-CRISPR associated (Cas) (CRISPR-Cas) system polynucleotide sequences comprising:
   [1484] (i) a guide sequence, which when transcribed is capable of hybridizing to a sequence of the at least one target viral nucleic acid to be manipulated;
   [1485] (ii) a trans-activating CRISPR RNA (tracr) mate sequence, which is linked to the guide sequence; and
   [1486] (iii) a tracr sequence, wherein when transcribed all or a portion of the tracr sequence is capable of hybridizing with the tracr mate sequence; and
[1487] (B) a CRISPR/Cas enzyme or a polynucleotide encoding a CRISPR/Cas enzyme,
[1488] wherein when the CRISPR/Cas system polynucleotide sequences are present as RNA within the cell and the CRISPR/Cas enzyme is present as a protein within the cell:
   [1489] (i) the tracr mate sequence is hybridized to the tracr sequence or portion thereof;
   [1490] (ii) the CRISPR/Cas system polynucleotide sequences are associated with the CRISPR/Cas enzyme, so forming a CRISPR/Cas complex; and
   [1491] (iii) the guide sequence hybridizes to a sequence of the at least one target viral nucleic acid thereby directing sequence-specific binding of the CRISPR/Cas complex to the at least one sequence of the target viral nucleic acid, whereupon said sequence of said target viral nucleic acid is manipulated by the CRISPR/Cas enzyme of the complex.

[1492] 55. A Clustered Regularly Interspersed Short Palindromic Repeats (CRISPR)-CRISPR-associated (Cas) (CRISPR-Cas) complex which, when introduced into a cell of a eukaryotic organism, is capable of modifying the cell by manipulating a target viral nucleic acid within the cell, the complex comprising:
[1493] (A) CRISPR-Cas system RNA polynucleotide sequences comprising:
   [1494] (i) a guide sequence, which is capable of hybridizing to a sequence of the target viral nucleic acid to be manipulated;
   [1495] (ii) a trans-activating CRISPR RNA (tracr) mate sequence, which is linked to the guide sequence; and
   [1496] (iii) a tracr sequence, wherein all or a portion of the tracr sequence is capable of hybridizing with the tracr mate sequence; and
[1497] (B) a CRISPR/Cas enzyme,
[1498] wherein when the CRISPR/Cas system RNA polynucleotide sequences and the CRISPR/Cas enzyme are present within the cell:
   [1499] (i) the tracr mate sequence is hybridized to the tracr sequence or portion thereof;
   [1500] (ii) the CRISPR/Cas system polynucleotide sequences are associated with the CRISPR/Cas enzyme, so forming a CRISPR/Cas complex; and
   [1501] (iii) the guide sequence hybridizes to a sequence of the target viral nucleic acid thereby directing sequence-specific binding of the CRISPR/Cas complex to the sequence of the target viral nucleic acid, whereupon said sequence of said target viral nucleic acid is manipulated by the CRISPR/Cas enzyme of the complex.

[1502] 56. A Clustered Regularly Interspersed Short Palindromic Repeats (CRISPR)-CRISPR-associated (Cas) (CRISPR-Cas) system chimeric RNA polynucleotide molecule (chiRNA) which, when introduced into a cell of a eukaryotic organism, is capable of associating with a CRISPR/Cas enzyme so forming a CRISPR-Cas complex, wherein the CRISPR-Cas complex is capable of modifying the cell by manipulating a target viral nucleic acid within the cell; the chiRNA comprising:
[1503] (i) a guide sequence, which is capable of hybridizing to a sequence of the target viral nucleic acid to be manipulated;
[1504] (ii) a trans-activating CRISPR RNA (tracr) mate sequence, which is linked to the guide sequence; and
[1505] (iii) a tracr sequence, wherein all or a portion of the tracr sequence is capable of hybridizing with the tracr mate sequence; and
[1506] wherein when the chiRNA and the CRISPR/Cas enzyme are present within the cell:
   [1507] a) the tracr mate sequence hybridizes to the tracr sequence or portion thereof;
   [1508] b) the chiRNA associates with the CRISPR/Cas enzyme, so forming the CRISPR/Cas complex; and
   [1509] c) the guide sequence hybridizes to a sequence of the target viral nucleic acid thereby directing sequence-specific binding of the CRISPR/Cas complex to the sequence of the target viral nucleic acid whereupon said sequence of said target viral nucleic acid is manipulated by the CRISPR/Cas enzyme of the complex.

[1510] 57. A DNA polynucleotide molecule comprising sequences encoding a Clustered Regularly Interspersed Short Palindromic Repeats (CRISPR)-CRISPR-associated (Cas) (CRISPR-Cas) system chimeric RNA polynucleotide molecule (chiRNA), wherein upon introduction of said chiRNA into a cell of a eukaryotic organism said chiRNA is capable of associating with a CRISPR/Cas enzyme so forming a CRISPR-Cas complex, wherein the CRISPR-Cas complex is capable of modifying the cell by manipulating a target viral nucleic acid within the cell; the chiRNA comprising:
[1511] (i) a guide sequence, which is capable of hybridizing to a sequence of the target viral nucleic acid to be manipulated;
[1512] (ii) a trans-activating CRISPR RNA (tracr) mate sequence, which is linked to the guide sequence; and
[1513] (iii) a tracr sequence, wherein all or a portion of the tracr sequence is capable of hybridizing with the tracr mate sequence; and
[1514] wherein when the chiRNA and the CRISPR/Cas enzyme are present within the cell:
[1515] a) the tracr mate sequence hybridizes to the tracr sequence or portion thereof;
[1516] b) the chiRNA associates with the CRISPR/Cas enzyme, so forming the CRISPR/Cas complex; and
[1517] c) the guide sequence hybridizes to a sequence of the target viral nucleic acid thereby directing sequence-specific binding of the CRISPR/Cas complex to the sequence of the target viral nucleic acid whereupon said sequence of said target viral nucleic acid is manipulated by the CRISPR/Cas enzyme of the complex.

[1518] 58. The method of paragraph 53 or composition of paragraph 54, wherein the CRISPR/Cas enzyme of the exogenous composition is provided as a polynucleotide sequence which comprises either (a) RNA or (b) DNA wherein the polynucleotide sequence is operably linked to a regulatory element capable of directing expression of RNA encoding the CRISPR/Cas enzyme.

[1519] 59. The method of paragraph 53 or composition of paragraph 54, wherein any of the CRISPR/Cas system polynucleotide sequences of the exogenous composition comprise either (a) RNA or (b) DNA wherein the polynucleotide sequences are operably linked to one or more regulatory elements capable of directing expression of CRISPR/Cas system RNA polynucleotide sequences.

[1520] 60. The method or composition of paragraph 59, wherein each of the CRISPR/Cas system polynucleotide sequences of the exogenous composition consists of RNA and wherein the CRISPR/Cas system polynucleotide sequences comprise a chimeric RNA polynucleotide molecule comprising the guide sequence, the tracr mate sequence and the tracr sequence.

[1521] 61. The method or composition of paragraph 59, wherein each of the CRISPR/Cas system polynucleotide sequences of the exogenous composition are provided as DNA polynucleotide sequences further comprising at least one regulatory element operably linked to polynucleotide sequences encoding CRISPR/Cas system RNA polynucleotide sequences and capable of directing expression thereof, and wherein the CRISPR/Cas system RNA polynucleotide sequences comprise a chimeric RNA polynucleotide molecule (chiRNA) comprising the guide sequence, the tracr mate sequence and the tracr sequence.

[1522] 62. The method or composition of any of paragraphs 59 to 61, the complex of paragraph 55, the chiRNA of claim 56 or the DNA polynucleotide molecule of paragraph 57; wherein each of the guide sequence, the tracr mate sequences and the tracr sequence are arranged in a 5′ to 3′ orientation; or wherein each of the guide sequence, the tracr mate sequences and the tracr sequence are arranged in a 3′ to 5′ orientation.

[1523] 63. The method or composition of any of paragraphs 58 to 62, wherein (a) the CRISPR/Cas system polynucleotide sequences or polynucleotide sequences encoding the CRISPR/Cas system polynucleotide sequences and/or (b) polynucleotide sequences encoding the CRISPR/Cas enzyme are comprised in one or more recombinant viral vectors

[1524] 64. The method or composition of claim 69, wherein polynucleotide sequences of (a) are located on the same or different recombinant viral vector as polynucleotide sequences of (b).

[1525] 65. The chiRNA of paragrpah 56 or the DNA polynucleotide molecule of paragraph 57 wherein the chiRNA or the DNA polynucleotide molecule is comprised in a recombinant viral vector.

[1526] 66. The method, composition, chiRNA or DNA polynucleotide of any of claims 63 to 65, wherein the viral vector is a retroviral vector, optionally a lentiviral vector, a baculoviral vector, a herpes simplex virus vector, an adenoviral vector, an adenoassociated viral (AAV) vector such as AAV8 vector, or a poxvirus such as a vaccinia virus.

[1527] 67. The method of any of paragraphs 58 to 62 wherein (a) the CRISPR/Cas system polynucleotide sequences or polynucleotide sequences encoding the CRISPR/Cas system polynucleotide sequences and/or (b) polynucleotide sequences encoding the CRISPR/Cas enzyme are delivered to the cell of the organism via liposomes, nanoparticles, exosomes, microvesicles or a gene-gun.

[1528] 68. The method, composition, complex, chiRNA or DNA polynucleotide molecule of any of paragraphs 53 to 67, wherein the tracr sequence is 30 or more nucleotides in length, 40 or more nucleotides in length, or 50 or more nucleotides in length.

[1529] 69. The method, composition, complex, chiRNA or DNA polynucleotide molecule of any of claims 53 to 68, wherein hybridization between the tracr sequence and the tracr mate sequence produces a transcript having secondary structure, preferably a hairpin.

[1530] 70. The method or composition of paragraph 69, wherein the tracr sequence comprises one or more regions capable of forming secondary structure, preferably a hairpin.

[1531] 71. The method or composition of paragraph 70, wherein the tracr sequence comprises one or more hairpins, two or more hairpins, three or more hairpins, four or more hairpins, five or more hairpins, or at most five hairpins.

[1532] 72. The method, composition, complex, chiRNA or DNA polynucleotide molecule of any of paragraphs 53 to 71, wherein the CRISPR/Cas enzyme is a Cas9 enzyme or a biologically active fragment or derivative thereof, such as a Streptococcus pyogenes Cas9 enzyme or a biologically active fragment or derivative thereof or a Streptococcus aureus Cas9 enzyme or a biologically active fragment or derivative thereof.

[1533] 73. The method, composition, complex, chiRNA or DNA polynucleotide molecule of any of paragraphs 53 to 72, wherein the CRISPR/Cas enzyme further comprises one or more nuclear localization sequences (NLSs) capable of driving the accumulation of the CRISPR/Cas enzyme to a detectible amount in the nucleus of the cell of the organism.

[1534] 74. The method, composition, complex, chiRNA or DNA polynucleotide molecule of claim 73, wherein the CRISPR/Cas enzyme comprises two or more NLSs, three or more NLSs, four or more NLSs, five or more NLSs, six or more NLSs, seven or more NLSs, eight or more NLSs, nine or more NLSs, or ten or more NLSs.

[1535] 75. The method, composition, complex, chiRNA or DNA polynucleotide molecule of claim 73 or 74, wherein the CRISPR/Cas enzyme comprises at least one NLS at or near the amino-terminus of the CRISPR/Cas enzyme and/or at least one NLS at or near the carboxy-terminus the CRISPR/Cas enzyme.

[1536] 76. The method, composition, complex, chiRNA or DNA polynucleotide molecule of any of claims 53 to 75, wherein when present as RNA within the cell the guide sequence is capable of hybridizing to a sequence of the target viral nucleic acid which is comprised in an episomal nucleic acid molecule which is not integrated into the genome of the organism and wherein said manipulation is a manipulation of the episomal viral nucleic acid molecule, preferably wherein the episomal nucleic acid molecule is a double-stranded DNA polynucleotide molecule.

[1537] 77. The method, composition, complex, chiRNA or DNA polynucleotide molecule of claim 76, wherein the episomal viral nucleic acid molecule is a covalently closed circular DNA (cccDNA).

[1538] 78. The method, composition, complex, chiRNA or DNA polynucleotide molecule of paragraph 76 or paragraph 77, wherein the CRISPR/Cas complex is capable of reducing the amount of episomal viral nucleic acid molecule in a cell of the organism compared to the amount of episomal viral nucleic acid molecule in a cell of the organism in the absence of providing the complex.

[1539] 79. The method, composition, complex, chiRNA or DNA polynucleotide molecule of any of paragraphs 76 to 78, wherein the CRISPR/Cas complex is capable of manipulating the episomal nucleic acid molecule to promote degradation of the episomal nucleic acid molecule.

[1540] 80. The method, composition, complex, chiRNA or DNA polynucleotide molecule of any of paragraphs 1 to 75, wherein when present as RNA within in the cell the guide sequence is capable of hybridizing to a sequence of the target viral nucleic acid which is integrated into the genome of the organism and wherein said manipulation is a manipulation of the integrated target nucleic acid.

[1541] 81. The method, composition, complex, chiRNA or DNA polynucleotide molecule of claim 80, wherein when formed within the cell the CRISPR/Cas complex is capable of manipulating the integrated nucleic acid to promote excision of all or part of the target viral nucleic acid from the genome of the organism.

[1542] 82. The use of a composition, complex, chiRNA or DNA polynucleotide molecule of any of paragraphs 54 to 66 or any of paragraphs 68 to 81 in the manipulation of at least one target viral nucleic acid within the cell of a eukaryotic organism.

[1543] 83. The method, composition, complex, chiRNA, DNA polynucleotide molecule or use of any of paragraphs 53 to 82, wherein said at least one target viral nucleic acid is comprised in a double-stranded DNA polynucleotide cccDNA molecule and/or viral DNA integrated into the genome of the organism and wherein said manipulation of the at least one target viral nucleic acid by the CRISPR-Cas complex comprises cleavage of viral cccDNA and/or integrated viral DNA.

[1544] 84. The method, composition, complex, chiRNA, DNA polynucleotide molecule or use of paragraph 83, wherein said cleavage comprises one or more double-strand break(s) introduced into the viral cccDNA and/or integrated viral DNA, optionally at least two double-strand break(s).

[1545] 85. The method, composition, complex, chiRNA, DNA polynucleotide molecule or use of paragraph 83, wherein said cleavage is via one or more single-strand break(s) introduced into the viral cccDNA and/or integrated viral DNA, optionally at least two single-strand break(s).

[1546] 86. The method, composition, complex, chiRNA, DNA polynucleotide molecule or use of paragraph 84 or 85, wherein said one or more double-strand break(s) or said one or more single-strand break(s) leads to the formation of one or more insertion and deletion mutations (INDELs) in the viral cccDNA sequences and/or integrated viral DNA sequences.

[1547] 87. The method, composition, complex, chiRNA, DNA polynucleotide molecule or use of paragraphs 83 to 86, wherein cleavage of the viral cccDNA sequences or viral DNA sequences integrated in the genome of the organism leads to excision of viral polynucleotide sequences from the cccDNA thereby reducing viral infection or excision of viral DNA sequences from the genome of the organism thereby reducing viral infection.

[1548] 88. The method or composition of paragraph 87, wherein said composition comprises components of at least two types of CRISPR/Cas complex, wherein each type of complex comprises a guide sequence capable of hybridizing to different sequences of the target nucleic acid, wherein said cleavage is cleavage of first and second strands of the viral DNA via at least two double-strand breaks introduced into the viral cccDNA and/or into or adjacent viral DNA integrated into the genome of the organism;
[1549] wherein a first double-strand break is introduced at a first position of the DNA by manipulating a first target sequence and a second double-strand break is introduced at a second position of the DNA by manipulating a second target sequence;
[1550] wherein upon introduction of first and second double-strand breaks viral sequences between first and second double-strand breaks are excised from cccDNA and/or from the genomic DNA of the organism.

[1551] 89. The method or composition of paragraph 87, wherein said composition comprises components of at least four types of CRISPR/Cas complex, wherein each type of complex comprises a guide sequence capable of hybridizing to different sequences of the target nucleic acid, wherein said cleavage is via at least two pairs of single-strand breaks introduced into the viral cccDNA and/or introduced into or adjacent viral DNA integrated into the genome of the organism;
[1552] wherein to introduce a first pair of single-strand breaks a first single-strand break is introduced into a first strand of DNA by manipulating a first target sequence to create a first nick and a second single-strand break is introduced into the opposite strand of DNA by manipulating a second target sequence to create a second nick;
[1553] wherein to introduce a second pair of single-strand breaks a third single-strand break is introduced into said first strand of DNA by manipulating a third target sequence to create a third nick and a fourth single-strand break is introduced into said opposite strand of DNA by manipulating a fourth target sequence to create a fourth nick;
[1554] wherein upon introduction of first and second pairs of single-strand breaks viral sequences between first and second pairs of single-strand breaks are excised from cccDNA and/or from the genomic DNA of the organism.

[1555] 90. The method or composition of paragraph 89, wherein first and second nicks are offset relative to each other by at least one base pair so creating a first overhang, and wherein third and fourth nicks are offset relative to each other by at least one base pair so creating a second overhang.

[1556] 91. The method of composition of paragraph 88, 89 or 90, wherein following excision of viral sequences the ends of the cleaved first strand of DNA are ligated together and the ends of the cleaved second strand of DNA are ligated together thus reforming unbroken first and second strands.

[1557] 92. The method, composition, complex, chiRNA, DNA polynucleotide molecule or use of any of paragraphs 85 to 87, 89, 90 or 91, wherein said single-strand break(s) is introduced into DNA by a nickase enzyme which is a modified Cas9 enzyme comprising a substitution leading to catalytic inactivation of the HNH nuclease domain or the RuvC nuclease domain of Cas9; optionally wherein the substitution is at position D10 of SpCas9, preferably a D10A substitution or substitution of a residue corresponding to position D10 in a SpCas9-related enzyme, or wherein the substitution is at position H840 of SpCas9, preferably a H840A substitution or substitution of a residue corresponding to position H840 in a SpCas9-related enzyme.

[1558] 93. The method, composition, complex, chiRNA, DNA polynucleotide molecule or use of any of paragraphs 53 to 82, wherein said target viral nucleic acid is cccDNA and/or viral DNA integrated into the genome of the organism and wherein said manipulation comprises insertion of one or more nucleotides into or adjacent viral cccDNA sequences or integrated viral DNA sequences, deletion of one or more nucleotides of viral cccDNA or integrated viral DNA, translocation of viral cccDNA sequences or integrated viral DNA sequences, repression of transcription of viral cccDNA sequences or integrated viral DNA sequences, and/or inactivation of viral cccDNA sequences or integrated viral DNA sequences.

[1559] 94. The method, composition, complex, chiRNA, DNA polynucleotide molecule or use of claim 92, wherein repression of transcription of viral cccDNA sequences and/or integrated viral DNA sequences is effected by a CRISPR-Cas system comprising a CRISPR enzyme fused to one or more transcriptional repressor domains, optionally wherein the one or more transcriptional repressor domains comprises KRAB, SID and/or SID4X, preferably wherein the CRISPR enzyme is a Cas9 enzyme.

[1560] 95. The method, composition, complex, chiRNA, DNA polynucleotide molecule or use of any of paragraphs 83 to 93, wherein said manipulation of nucleotide sequences of viral cccDNA or integrated viral DNA leads to disruption of one or more viral open reading frames, disruption of viral mRNA expression and/or inhibition of the production of functional virions.

[1561] 96. The method, composition, complex, chiRNA, DNA polynucleotide molecule or use of any of paragraphs 83 to 93, wherein manipulation of said viral cccDNA leads to a reduction in the level of one or more of viral rcDNA, viral cccDNA and viral ssDNA compared to the level in the absence of the CRISPR/Cas complex.

[1562] 97. The method, composition, complex, chiRNA, DNA polynucleotide molecule or use of any of paragraphs 83 to 95, wherein the effect of said manipulation comprises inhibiting the production of new virions.

[1563] 98. The method, composition, complex, chiRNA, DNA polynucleotide molecule or use of any of paragraphs 83 to 96, wherein the effect of said modifying comprises removing viral sequences from said organism thereby reducing viral infection.

[1564] 99. The method or composition of any of paragraphs 53, 54, 58 to 87 and 93 to 98, wherein said composition further comprises components of one or more additional CRISPR/Cas complexes, wherein each type of complex comprises a different guide sequence capable hybridizing to a different sequence of the target nucleic acid within the cell.

[1565] 100. The method, composition, complex, chiRNA, DNA polynucleotide molecule or use of any of paragraphs 53 to 99 wherein the target viral nucleic acid is a hepatitis B virus (HBV) nucleic acid, preferably wherein the cell expresses the sodium taurocholate cotransporting polypeptide (NTCP) or wherein the cell is a hepatocyte, preferably a primary hepatocyte, more preferably a human hepatocyte or a human primary hepatocyte, a HepG2.2.15 or a HepG2-hNTCP cell.

[1566] 101. The method, composition, complex, chiRNA, DNA polynucleotide molecule or use of claim 100, wherein the guide sequence is capable of hybridizing with target viral nucleic acids of HBV ORF S, ORF C, ORF P, or ORF X, preferably ORF C.

[1567] 102. The method, composition, complex, chiRNA or DNA polynucleotide molecule of paragraph 100 or claim 101, wherein the sequence of the guide sequence comprises 5′-gggcgcacctctctttacg-3′ (SEQ ID NO: 1750), 5′-cctctgccgatccatactg-3′ (SEQ ID NO: 1472) or 5′-taaagaatttggagctactg-3′ (SEQ ID NO: 1566).

[1568] 103. The method, composition, complex, chiRNA, DNA polynucleotide molecule or use of any of paragrpahs 53 to 99 wherein the target viral nucleic acid is a human papillomavirus (HPV) nucleic acid, an Epstein Barr virus (EBV) nucleic acid or a varicella zoster virus (VZV) nucleic acid.

[1569] 104. The method, composition, complex, chiRNA, DNA polynucleotide molecule or use of any of paragraphs 53 to 103 wherein said manipulation is performed in vitro or ex vivo.

[1570] 105. The composition, complex, chiRNA or DNA polynucleotide molecule according to any of paragraphs 54 to 66 and 68-99 for use as a medicament.

[1571] 106. The composition, complex or chiRNA or DNA polynucleotide molecule according to any of paragraphs 54 to 66 and 68-99 for use in the treatment of a viral infection.

[1572] 107. The composition, complex or chiRNA or DNA polynucleotide molecule for use according to paragraph 106, wherein the viral infection is caused by hepatitis B virus (HBV).

[1573] 108. The composition, complex or chiRNA or DNA polynucleotide molecule for use according to paragraph 106, wherein the viral infection is caused by human papillomavirus (HPV), Epstein Barr virus (EBV) or varicella zoster virus (VZV).

[1574] 109. The composition, complex or chiRNA or DNA polynucleotide molecule for use according to any of paragraphs 104 to 108 wherein said organism is a mammal.

[1575] 110. The composition, complex or chiRNA or DNA polynucleotide molecule for use according to paragraph 109 wherein said mammal is a human.

[1576] 111. The use of a composition, complex, chiRNA or DNA according to any of paragraph 54 to 66 or 68-99 in the manufacture of a medicament.

[1577] 112. The use of a composition, complex, chiRNA or DNA according to any of claim 54 to 66 or 68-99 in the manufacture of a medicament for the treatment of a viral infection.

[1578] 113. The use according to paragraph 112, wherein the viral infection is caused by hepatitis B virus (HBV).

[1579] 114. The use according to paragraph 112, wherein the viral infection is caused by human papillomavirus (HPV), Epstein Barr virus (EBV) or varicella zoster virus (VZV).

[1580] 115. The use according to any of paragraphs 111 to 114 wherein said organism is a mammal.

[1581] 116. The use according to paragraph 115 wherein said mammal is a human.

[1582] While preferred embodiments of the present invention have been shown and described herein, it will be obvious to those skilled in the art that such embodiments are provided by way of example only. Numerous variations, changes, and substitutions will now occur to those skilled in the art without departing from the invention. It should be understood that various alternatives to the embodiments of the invention described herein may be employed in practicing the invention.

1-33. (canceled)

34. A method of treating a hepatitis B virus (HBV) infection in a mammal, comprising administering an effective amount of a CRISPR-Cas system to the mammal, wherein the CRISPR-Cas system comprises
(i) a catalytically inactive CRISPR protein that is fused to a transcriptional repressor or a polynucleotide encoding a catalytically inactive CRISPR protein that is fused to a transcriptional repressor,
(ii) a CRISPR-Cas system polynucleotide targeting a target HBV sequence comprised both in an HBV covalently closed circular DNA (cccDNA) and in an HBV DNA integrated into the genome of a liver cell, wherein the CRISPR-Cas system polynucleotide comprises:
(a) a guide sequence capable of hybridizing to the target HBV sequence,
(b) a tracr sequence, and
(c) a tracr mate sequence capable of hybridizing to the tracr sequence,
wherein the CRISPR-Cas system polynucleotide forms a CRISPR complex with the CRISPR protein in the liver cell and directs sequence-specific binding of the CRISPR complex to the target HBV sequence both in the HBV cccDNA and in the HBV DNA integrated into the genome of the liver cell,
thereby resulting in the transcriptional repressor repressing the expression of both the HBV cccDNA and the HBV DNA integrated into the genome of the liver cell and reducing HBsAg, serum HBV DNA and HBV RNA in vivo in the mammal.

35. The method of claim 34, wherein the catalytically inactive CRISPR protein further comprises a heterologous functional domain selected from a transcriptional activator, a transcriptional repressor, a recombinase, a transposase, a histone remodeler, a demethylase, or a DNA methyltransferase.

36. The method of claim 35, wherein the heterologous functional domain is a DNA methyltransferase.

37. The method of claim 35, wherein the heterologous functional domain is VP64, SID4X, or KRAB.

38. The method of claim 34, wherein the CRISPR protein further comprises one or more nuclear localization sequences (NLSs) capable of driving the accumulation of the CRISPR protein to a detectible amount in the nucleus of the liver cell.

39. The method of claim 38, wherein the CRISPR protein comprises at least one NLS at or near the amino-terminus of the CRISPR protein and/or at least one NLS at or near the carboxy-terminus the CRISPR protein.

40. The method of claim 34, wherein the CRISPR-Cas system is comprised in a liposome or a lipid particle.

41. The method of claim 34, wherein the CRISPR protein is Cas9.

42. The method of claim 41, wherein the CRISPR protein is Staphylococcus aureus Cas9.

43. The method of claim 41, wherein the CRISPR protein is Streptococcus pyogenes Cas9.

44. The method of claim 34, wherein the CRISPR protein and/or the CRISPR-Cas system polynucleotides are encoded or comprised within a vector system comprising one or more vectors.

45. The method of claim 44, wherein the one or more vectors comprise one or more viral vectors.

46. The method of claim 45, wherein the one or more viral vectors comprise one or more lentiviral, adenoviral or adeno-associated viral (AAV) vectors.

47. The method of claim 34, wherein the CRISPR-Cas system polynucleotide is a chimeric RNA (chiRNA).

48. The method of claim 44, wherein the CRISPR protein and the CRISPR-Cas system polynucleotides are encoded in a single vector.

49. The method of claim 34, further comprising administering an additional HBV treatment to the mammal.

50. The method of claim 49, wherein the additional treatment comprises an epigenetic modifier.

51. The method of claim 50, wherein the epigenetic modifier selected from trichostatin A (TSA), valproate, and nicotinamide (NAM), or Type I interferon.

52. The method of claim 34, wherein the mammal is a human subject.

The application's sequence listing, which the Patent Office published only in electronic form, follows.

SEQUENCE LISTING (1750 sequences)

SEQ ID NO: 1-12 - skipped (12 entries)

SEQ ID NO: 13 - DNA, 137 bp, synthetic construct
  misc_difference 1..20: note = a, c, t, g, unknown or other
  misc_feature 1..137: note = Description of Artificial Sequence: Synthetic polynucleotide
  source 1..137: mol_type = other DNA
nnnnnnnnnnnnnnnnnnnngtttttgtactctcaagatttagaaataaatcttgcagaagctacaaagataaggcttcatgccgaaatcaacaccctgtcattttatggcagggtgttttcgttatttaatttttt

SEQ ID NO: 14 - DNA, 123 bp, synthetic construct
  misc_difference 1..20: note = a, c, t, g, unknown or other
  misc_feature 1..123: note = Description of Artificial Sequence: Synthetic polynucleotide
  source 1..123: mol_type = other DNA
nnnnnnnnnnnnnnnnnnnngtttttgtactctcagaaatgcagaagctacaaagataaggcttcatgccgaaatcaacaccctgtcattttatggcagggtgttttcgttatttaatttttt

SEQ ID NO: 15 - DNA, 110 bp, synthetic construct
  misc_difference 1..20: note = a, c, t, g, unknown or other
  misc_feature 1..110: note = Description of Artificial Sequence: Synthetic polynucleotide
  source 1..110: mol_type = other DNA
nnnnnnnnnnnnnnnnnnnngtttttgtactctcagaaatgcagaagctacaaagataaggcttcatgccgaaatcaacaccctgtcattttatggcagggtgttttttt

SEQ ID NO: 16 - DNA, 102 bp, synthetic construct
  misc_difference 1..20: note = a, c, t, g, unknown or other
  misc_feature 1..102: note = Description of Artificial Sequence: Synthetic polynucleotide
  source 1..102: mol_type = other DNA
nnnnnnnnnnnnnnnnnnnngttttagagctagaaatagcaagttaaaataaggctagtccgttatcaacttgaaaaagtggcaccgagtcggtgctttttt

SEQ ID NO: 17 - DNA, 88 bp, synthetic construct
  misc_difference 1..20: note = a, c, t, g, unknown or other
  misc_feature 1..88: note = Description of Artificial Sequence: Synthetic oligonucleotide
  source 1..88: mol_type = other DNA
nnnnnnnnnnnnnnnnnnnngttttagagctagaaatagcaagttaaaataaggctagtccgttatcaacttgaaaaagtgttttttt

SEQ ID NO: 18 - DNA, 76 bp, synthetic construct
  misc_difference 1..20: note = a, c, t, g, unknown or other
  misc_feature 1..76: note = Description of Artificial Sequence: Synthetic oligonucleotide
  source 1..76: mol_type = other DNA
nnnnnnnnnnnnnnnnnnnngttttagagctagaaatagcaagttaaaataaggctagtccgttatcatttttttt

SEQ ID NO: 19 - DNA, 20 bp, Homo sapiens
  source 1..20: mol_type = unassigned DNA
gagtccgagcagaagaagaa

SEQ ID NO: 20 - DNA, 20 bp, Homo sapiens
  source 1..20: mol_type = unassigned DNA
gagtcctagcaggagaagaa

SEQ ID NO: 21 - DNA, 20 bp, Homo sapiens
  source 1..20: mol_type = unassigned DNA
gagtctaagcagaagaagaa

SEQ ID NO: 22 - protein, 7 aa, Simian virus 40
PKKKRKV

SEQ ID NO: 23 - protein, 16 aa, unidentified
  REGION 1..16: note = Description of Unknown: Nucleoplasmin bipartite NLS sequence
KRPAATKKAGQAKKKK

SEQ ID NO: 24 - protein, 9 aa, unidentified
  REGION 1..9: note = Description of Unknown: C-myc NLS sequence
PAAKRVKLD

SEQ ID NO: 25 - protein, 11 aa, unidentified
  REGION 1..11: note = Description of Unknown: C-myc NLS sequence
RQRRNELKRSP

SEQ ID NO: 26 - protein, 38 aa, Homo sapiens
NQSSNFGPMKGGNFGGRSSGPYGGGGQYFAKPRNQGGY

SEQ ID NO: 27 - protein, 42 aa, unidentified
  REGION 1..42: note = Description of Unknown: IBB domain from importin-alpha sequence
RMRIZFKNKGKDTAELRRRRVEVSVELRKAKKDEQILKRRNV

SEQ ID NO: 28 - protein, 8 aa, unidentified
  REGION 1..8: note = Description of Unknown: Myoma T protein sequence
VSRKRPRP

SEQ ID NO: 29 - protein, 8 aa, unidentified
  REGION 1..8: note = Description of Unknown: Myoma T protein sequence
PPKKARED

SEQ ID NO: 30 - protein, 8 aa, Homo sapiens
PQPKKKPL

SEQ ID NO: 31 - protein, 12 aa, Mus musculus
SALIKKKKKMAP

SEQ ID NO: 32 - protein, 5 aa, Influenza virus
DRLRR

SEQ ID NO: 33 - protein, 7 aa, Influenza virus
PKQKKRK

SEQ ID NO: 34 - protein, 10 aa, Hepatitis delta virus
RKLKKKIKKL

SEQ ID NO: 35 - protein, 10 aa, Mus musculus
REKKKFLKRR

SEQ ID NO: 36 - protein, 20 aa, Homo sapiens
KRKGDEVDGVDEVAKKKSKK

SEQ ID NO: 37 - protein, 17 aa, Homo sapiens
RKCLQAGMNLEARKTKK

SEQ ID NO: 38-91 - skipped (54 entries)

SEQ ID NO: 92 - RNA, 12 nt, synthetic construct
  misc_feature 1..12: note = Description of Artificial Sequence: Synthetic oligonucleotide
  source 1..12: mol_type = other RNA
gttttagagcta

SEQ ID NO: 93 - DNA, 23 bp, synthetic construct
  misc_feature 1..23: note = Description of Artificial Sequence: Synthetic oligonucleotide
  source 1..23: mol_type = other DNA
taatacgactcactatagggaga

SEQ ID NO: 94 - DNA, 25 bp, synthetic construct
  misc_feature 1..25: note = Description of Artificial Sequence: Synthetic oligonucleotide
  source 1..25: mol_type = other DNA
caccaaactctgcaagatcccagag

SEQ ID NO: 95 - DNA, 25 bp, synthetic construct
  misc_feature 1..25: note = Description of Artificial Sequence: Synthetic oligonucleotide
  source 1..25: mol_type = other DNA
aaactctgcaagatcccagagtgag

SEQ ID NO: 96 - DNA, 25 bp, synthetic construct
  misc_feature 1..25: note = Description of Artificial Sequence: Synthetic oligonucleotide
  source 1..25: mol_type = other DNA
actctgcaagatcccagagtgagag

SEQ ID NO: 97 - DNA, 25 bp, synthetic construct
  misc_feature 1..25: note = Description of Artificial Sequence: Synthetic oligonucleotide
  source 1..25: mol_type = other DNA
ccctgctggtggctccagttcagga

SEQ ID NO: 98 - DNA, 25 bp, synthetic construct
  misc_feature 1..25: note = Description of Artificial Sequence: Synthetic oligonucleotide
  source 1..25: mol_type = other DNA
cctgctggtggctccagttcaggag

SEQ ID NO: 99 - DNA, 25 bp, synthetic construct
  misc_feature 1..25: note = Description of Artificial Sequence: Synthetic oligonucleotide
  source 1..25: mol_type = other DNA
ctcccttatcgtcaatcttctcgag

SEQ ID NO: 100 - DNA, 25 bp, synthetic construct
  misc_feature 1..25: note = Description of Artificial Sequence: Synthetic oligonucleotide
  source 1..25: mol_type = other DNA
cccttatcgtcaatcttctcgagga

SEQ ID NO: 101 - DNA, 25 bp, synthetic construct
  misc_feature 1..25: note = Description of Artificial Sequence: Synthetic oligonucleotide
  source 1..25: mol_type = other DNA
atcgtcaatcttctcgaggattggg

SEQ ID NO: 102 - DNA, 25 bp, synthetic construct
  misc_feature 1..25: note = Description of Artificial Sequence: Synthetic oligonucleotide
  source 1..25: mol_type = other DNA
tcgtcaatcttctcgaggattgggg

SEQ ID NO: 103 - DNA, 25 bp, synthetic construct
  misc_feature 1..25: note = Description of Artificial Sequence: Synthetic oligonucleotide
  source 1..25: mol_type = other DNA
cgtcaatcttctcgaggattgggga

SEQ ID NO: 104 - DNA, 25 bp, synthetic construct
  misc_feature 1..25: note = Description of Artificial Sequence: Synthetic oligonucleotide
  source 1..25: mol_type = other DNA
cgaggattggggaccctgcgctgaa

SEQ ID NO: 105 - DNA, 25 bp, synthetic construct
  misc_feature 1..25: note = Description of Artificial Sequence: Synthetic oligonucleotide
  source 1..25: mol_type = other DNA
ttggggaccctgcgctgaacatgga

SEQ ID NO: 106 - DNA, 25 bp, synthetic construct
  misc_feature 1..25: note = Description of Artificial Sequence: Synthetic oligonucleotide
  source 1..25: mol_type = other DNA
tggggaccctgcgctgaacatggag

SEQ ID NO: 107 - DNA, 25 bp, synthetic construct
  misc_feature 1..25: note = Description of Artificial Sequence: Synthetic oligonucleotide
  source 1..25: mol_type = other DNA
gggaccctgcgctgaacatggagaa

SEQ ID NO: 108 - DNA, 25 bp, synthetic construct
  misc_feature 1..25: note = Description of Artificial Sequence: Synthetic oligonucleotide
  source 1..25: mol_type = other DNA
gaacatggagaacatcacatcagga

SEQ ID NO: 109 - DNA, 25 bp, synthetic construct
  misc_feature 1..25: note = Description of Artificial Sequence: Synthetic oligonucleotide
  source 1..25: mol_type = other DNA
gaacatcacatcaggattcctagga

SEQ ID NO: 110 - DNA, 25 bp, synthetic construct
  misc_feature 1..25: note = Description of Artificial Sequence: Synthetic oligonucleotide
  source 1..25: mol_type = other DNA
gaccccttctcgtgttacaggcggg

SEQ ID NO: 111 - DNA, 25 bp, synthetic construct
  misc_feature 1..25: note = Description of Artificial Sequence: Synthetic oligonucleotide
  source 1..25: mol_type = other DNA
accccttctcgtgttacaggcgggg

SEQ ID NO: 112 - DNA, 25 bp, synthetic construct
  misc_feature 1..25: note = Description of Artificial Sequence: Synthetic oligonucleotide
  source 1..25: mol_type = other DNA
gcggggtttttcttgttgacaagaa

SEQ ID NO: 113 - DNA, 25 bp, synthetic construct
  misc_feature 1..25: note = Description of Artificial Sequence: Synthetic oligonucleotide
  source 1..25: mol_type = other DNA
caagaatcctcacaataccgcagag

SEQ ID NO: 114 - DNA, 25 bp, synthetic construct
  misc_feature 1..25: note = Description of Artificial Sequence: Synthetic oligonucleotide
  source 1..25: mol_type = other DNA
ccgcagagtctagactcgtggtgga

SEQ ID NO: 115 - DNA, 25 bp, synthetic construct
  misc_feature 1..25: note = Description of Artificial Sequence: Synthetic oligonucleotide
  source 1..25: mol_type = other DNA
gtggacttctctcaattttctaggg

SEQ ID NO: 116 - DNA, 25 bp, synthetic construct
  misc_feature 1..25: note = Description of Artificial Sequence: Synthetic oligonucleotide
  source 1..25: mol_type = other DNA
tggacttctctcaattttctagggg

SEQ ID NO: 117 - DNA, 25 bp, synthetic construct
  misc_feature 1..25: note = Description of Artificial Sequence: Synthetic oligonucleotide
  source 1..25: mol_type = other DNA
ggacttctctcaattttctaggggg

SEQ ID NO: 118 - DNA, 25 bp, synthetic construct
  misc_feature 1..25: note = Description of Artificial Sequence: Synthetic oligonucleotide
  source 1..25: mol_type = other DNA
gacttctctcaattttctaggggga

SEQ ID NO: 119 - DNA, 25 bp, synthetic construct
  misc_feature 1..25: note = Description of Artificial Sequence: Synthetic oligonucleotide
  source 1..25: mol_type = other DNA
acttctctcaattttctagggggaa

SEQ ID NO: 120 - DNA, 25 bp, synthetic construct
  misc_feature 1..25: note = Description of Artificial Sequence: Synthetic oligonucleotide
  source 1..25: mol_type = other DNA
ccaacttgtcctggttatcgctgga

SEQ ID NO: 121 - DNA, 25 bp, synthetic construct
  misc_feature 1..25: note = Description of Artificial Sequence: Synthetic oligonucleotide
  source 1..25: mol_type = other DNA
tcatcttcttgttggttcttctgga

SEQ ID NO: 122 - DNA, 25 bp, synthetic construct
  misc_feature 1..25: note = Description of Artificial Sequence: Synthetic oligonucleotide
  source 1..25: mol_type = other DNA
gcccgtttgtcctctaattccagga

SEQ ID NO: 123 - DNA, 25 bp, synthetic construct
  misc_feature 1..25: note = Description of Artificial Sequence: Synthetic oligonucleotide
  source 1..25: mol_type = other DNA
caggatcctcaaccaccagcacggg

SEQ ID NO: 124 - DNA, 25 bp, synthetic construct
  misc_feature 1..25: note = Description of Artificial Sequence: Synthetic oligonucleotide
  source 1..25: mol_type = other DNA
aggatcctcaaccaccagcacggga

SEQ ID NO: 125 - DNA, 25 bp, synthetic construct
  misc_feature 1..25: note = Description of Artificial Sequence: Synthetic oligonucleotide
  source 1..25: mol_type = other DNA
accaccagcacgggaccatgccgaa

SEQ ID NO: 126 - DNA, 25 bp, synthetic construct
  misc_feature 1..25: note = Description of Artificial Sequence: Synthetic oligonucleotide
  source 1..25: mol_type = other DNA
aacctgcatgactactgctcaagga

SEQ ID NO: 127 - DNA, 25 bp, synthetic construct
  misc_feature 1..25: note = Description of Artificial Sequence: Synthetic oligonucleotide
  source 1..25: mol_type = other DNA
acctgcatgactactgctcaaggaa

SEQ ID NO: 128 - DNA, 25 bp, synthetic construct
  misc_feature 1..25: note = Description of Artificial Sequence: Synthetic oligonucleotide
  source 1..25: mol_type = other DNA
cctgttgctgtaccaaaccttcgga

SEQ ID NO: 129 - DNA, 25 bp, synthetic construct
  misc_feature 1..25: note = Description of Artificial Sequence: Synthetic oligonucleotide
  source 1..25: mol_type = other DNA
ttgctgtaccaaaccttcggacgga

SEQ ID NO: 130 - DNA, 25 bp, synthetic construct
  misc_feature 1..25: note = Description of Artificial Sequence: Synthetic oligonucleotide
  source 1..25: mol_type = other DNA
tgctgtaccaaaccttcggacggaa

SEQ ID NO: 131 - DNA, 25 bp, synthetic construct
  misc_feature 1..25: note = Description of Artificial Sequence: Synthetic oligonucleotide
  source 1..25: mol_type = other DNA
tgtattcccatcccatcatcctggg

SEQ ID NO: 132 - DNA, 25 bp, synthetic construct
  misc_feature 1..25: note = Description of Artificial Sequence: Synthetic oligonucleotide
  source 1..25: mol_type = other DNA
catcccatcatcctgggctttcgga

SEQ ID NO: 133 - DNA, 25 bp, synthetic construct
  misc_feature 1..25: note = Description of Artificial Sequence: Synthetic oligonucleotide
  source 1..25: mol_type = other DNA
atcccatcatcctgggctttcggaa

SEQ ID NO: 134 - DNA, 25 bp, synthetic construct
  misc_feature 1..25: note = Description of Artificial Sequence: Synthetic oligonucleotide
  source 1..25: mol_type = other DNA
tgggctttcggaaaattcctatggg

SEQ ID NO: 135 - DNA, 25 bp, synthetic construct
  misc_feature 1..25: note = Description of Artificial Sequence: Synthetic oligonucleotide
  source 1..25: mol_type = other DNA
gggctttcggaaaattcctatggga

SEQ ID NO: 136 - DNA, 25 bp, synthetic construct
  misc_feature 1..25: note = Description of Artificial Sequence: Synthetic oligonucleotide
  source 1..25: mol_type = other DNA
ggctttcggaaaattcctatgggag

SEQ ID NO: 137 - DNA, 25 bp, synthetic construct
  misc_feature 1..25: note = Description of Artificial Sequence: Synthetic oligonucleotide
  source 1..25: mol_type = other DNA
ttcggaaaattcctatgggagtggg

SEQ ID NO: 138 - DNA, 25 bp, synthetic construct
  misc_feature 1..25: note = Description of Artificial Sequence: Synthetic oligonucleotide
  source 1..25: mol_type = other DNA
gccatttgttcagtggttcgtaggg

SEQ ID NO: 139 - DNA, 25 bp, synthetic construct
  misc_feature 1..25: note = Description of Artificial Sequence: Synthetic oligonucleotide
  source 1..25: mol_type = other DNA
actgtttggctttcagttatatgga

SEQ ID NO: 140 - DNA, 25 bp, synthetic construct
  misc_feature 1..25: note = Description of Artificial Sequence: Synthetic oligonucleotide
  source 1..25: mol_type = other DNA
gttatatggatgatgtggtattggg

SEQ ID NO: 141 - DNA, 25 bp, synthetic construct
  misc_feature 1..25: note = Description of Artificial Sequence: Synthetic oligonucleotide
  source 1..25: mol_type = other DNA
ttatatggatgatgtggtattgggg

SEQ ID NO: 142 - DNA, 25 bp, synthetic construct
  misc_feature 1..25: note = Description of Artificial Sequence: Synthetic oligonucleotide
  source 1..25: mol_type = other DNA
tatatggatgatgtggtattggggg

SEQ ID NO: 143 - DNA, 25 bp, synthetic construct
  misc_feature 1..25: note = Description of Artificial Sequence: Synthetic oligonucleotide
  source 1..25: mol_type = other DNA
ggccaagtctgtacagcatcttgag

SEQ ID NO: 144 - DNA, 25 bp, synthetic construct
  misc_feature 1..25: note = Description of Artificial Sequence: Synthetic oligonucleotide
  source 1..25: mol_type = other DNA
ttaccaattttcttttgtctttggg

SEQ ID NO: 145 - DNA, 25 bp, synthetic construct
  misc_feature 1..25: note = Description of Artificial Sequence: Synthetic oligonucleotide
  source 1..25: mol_type = other DNA
atttaaaccctaacaaaacaaagag

SEQ ID NO: 146 - DNA, 25 bp, synthetic construct
  misc_feature 1..25: note = Description of Artificial Sequence: Synthetic oligonucleotide
  source 1..25: mol_type = other DNA
aaccctaacaaaacaaagagatggg

SEQ ID NO: 147 - DNA, 25 bp, synthetic construct
  misc_feature 1..25: note = Description of Artificial Sequence: Synthetic oligonucleotide
  source 1..25: mol_type = other DNA
accctaacaaaacaaagagatgggg

SEQ ID NO: 148 - DNA, 25 bp, synthetic construct
  misc_feature 1..25: note = Description of Artificial Sequence: Synthetic oligonucleotide
  source 1..25: mol_type = other DNA
caaagagatggggttactctctgaa

SEQ ID NO: 149 - DNA, 25 bp, synthetic construct
  misc_feature 1..25: note = Description of Artificial Sequence: Synthetic oligonucleotide
  source 1..25: mol_type = other DNA
ggggttactctctgaattttatggg

SEQ ID NO: 150 - DNA, 25 bp, synthetic construct
  misc_feature 1..25: note = Description of Artificial Sequence: Synthetic oligonucleotide
  source 1..25: mol_type = other DNA
gaattttatgggttatgtcattgga

SEQ ID NO: 151 - DNA, 25 bp, synthetic construct
  misc_feature 1..25: note = Description of Artificial Sequence: Synthetic oligonucleotide
  source 1..25: mol_type = other DNA
aattttatgggttatgtcattggaa

SEQ ID NO: 152 - DNA, 25 bp, synthetic construct
  misc_feature 1..25: note = Description of Artificial Sequence: Synthetic oligonucleotide
  source 1..25: mol_type = other DNA
gggttatgtcattggaagttatggg

SEQ ID NO: 153 - DNA, 25 bp, synthetic construct
  misc_feature 1..25: note = Description of Artificial Sequence: Synthetic oligonucleotide
  source 1..25: mol_type = other DNA
aagttatgggtccttgccacaagaa

SEQ ID NO: 154 - DNA, 25 bp, synthetic construct
  misc_feature 1..25: note = Description of Artificial Sequence: Synthetic oligonucleotide
  source 1..25: mol_type = other DNA
acacatcatacaaaaaatcaaagaa

SEQ ID NO: 155 - DNA, 25 bp, synthetic construct
  misc_feature 1..25: note = Description of Artificial Sequence: Synthetic oligonucleotide
  source 1..25: mol_type = other DNA
caaaaaatcaaagaatgttttagaa

SEQ ID NO: 156 - DNA, 25 bp, synthetic construct
  misc_feature 1..25: note = Description of Artificial Sequence: Synthetic oligonucleotide
  source 1..25: mol_type = other DNA
cctattaacaggcctattgattgga

SEQ ID NO: 157 - DNA, 25 bp, synthetic construct
  misc_feature 1..25: note = Description of Artificial Sequence: Synthetic oligonucleotide
  source 1..25: mol_type = other DNA
ctattaacaggcctattgattggaa

SEQ ID NO: 158 - DNA, 25 bp, synthetic construct
  misc_feature 1..25: note = Description of Artificial Sequence: Synthetic oligonucleotide
  source 1..25: mol_type = other DNA
attgattggaaagtatgtcaacgaa

SEQ ID NO: 159 - DNA, 25 bp, synthetic construct
  misc_feature 1..25: note = Description of Artificial Sequence: Synthetic oligonucleotide
  source 1..25: mol_type = other DNA
ggaaagtatgtcaacgaattgtggg

SEQ ID NO: 160 - DNA, 25 bp, synthetic construct
  misc_feature 1..25: note = Description of Artificial Sequence: Synthetic oligonucleotide
  source 1..25: mol_type = other DNA
gtcaacgaattgtgggtcttttggg

SEQ ID NO: 161 - DNA, 25 bp, synthetic construct
  misc_feature 1..25: note = Description of Artificial Sequence: Synthetic oligonucleotide
  source 1..25: mol_type = other DNA
cctttctgtgtaaacaatacctgaa

SEQ ID NO: 162 - DNA, 25 bp, synthetic construct
  misc_feature 1..25: note = Description of Artificial Sequence: Synthetic oligonucleotide
  source 1..25: mol_type = other DNA
gctgacgcaacccccactggctggg

SEQ ID NO: 163 - DNA, 25 bp, synthetic construct
  misc_feature 1..25: note = Description of Artificial Sequence: Synthetic oligonucleotide
  source 1..25: mol_type = other DNA
ctgacgcaacccccactggctgggg

SEQ ID NO: 164 - DNA, 25 bp, synthetic construct
  misc_feature 1..25: note = Description of Artificial Sequence: Synthetic oligonucleotide
  source 1..25: mol_type = other DNA
ccactggctggggcttggtcatggg

SEQ ID NO: 165 - DNA, 25 bp, synthetic construct
  misc_feature 1..25: note = Description of Artificial Sequence: Synthetic oligonucleotide
  source 1..25: mol_type = other DNA
catgggccatcagcgcgtgcgtgga

SEQ ID NO: 166 - DNA, 25 bp, synthetic construct
  misc_feature 1..25: note = Description of Artificial Sequence: Synthetic oligonucleotide
  source 1..25: mol_type = other DNA
atgggccatcagcgcgtgcgtggaa

SEQ ID NO: 167 - DNA, 25 bp, synthetic construct
  misc_feature 1..25: note = Description of Artificial Sequence: Synthetic oligonucleotide
  source 1..25: mol_type = other DNA
ctcctctgccgatccatactgcgga

SEQ ID NO: 168 - DNA, 25 bp, synthetic construct
  misc_feature 1..25: note = Description of Artificial Sequence: Synthetic oligonucleotide
  source 1..25: mol_type = other DNA
tcctctgccgatccatactgcggaa

SEQ ID NO: 169 - DNA, 25 bp, synthetic construct
  misc_feature 1..25: note = Description of Artificial Sequence: Synthetic oligonucleotide
  source 1..25: mol_type = other DNA
ttgttttgctcgcagcaggtctgga

SEQ ID NO: 170 - DNA, 25 bp, synthetic construct
  misc_feature 1..25: note = Description of Artificial Sequence: Synthetic oligonucleotide
  source 1..25: mol_type = other DNA
tgttttgctcgcagcaggtctggag

SEQ ID NO: 171 - DNA, 25 bp, synthetic construct
  misc_feature 1..25: note = Description of Artificial Sequence: Synthetic oligonucleotide
  source 1..25: mol_type = other DNA
caggtctggagcaaacattatcggg

SEQ ID NO: 172 - DNA, 25 bp, synthetic construct
  misc_feature 1..25: note = Description of Artificial Sequence: Synthetic oligonucleotide
  source 1..25: mol_type = other DNA
aggtctggagcaaacattatcggga

SEQ ID NO: 173 - DNA, 25 bp, synthetic construct
  misc_feature 1..25: note = Description of Artificial Sequence: Synthetic oligonucleotide
  source 1..25: mol_type = other DNA
ctgctaggctgtgctgccaactgga

SEQ ID NO: 174 - DNA, 25 bp, synthetic construct
  misc_feature 1..25: note = Description of Artificial Sequence: Synthetic oligonucleotide
  source 1..25: mol_type = other DNA
tgctgccaactggatcctgcgcggg

SEQ ID NO: 175 - DNA, 25 bp, synthetic construct
  misc_feature 1..25: note = Description of Artificial Sequence: Synthetic oligonucleotide
  source 1..25: mol_type = other DNA
gctgccaactggatcctgcgcggga

SEQ ID NO: 176 - DNA, 25 bp, synthetic construct
  misc_feature 1..25: note = Description of Artificial Sequence: Synthetic oligonucleotide
  source 1..25: mol_type = other DNA
ttgtttacgtcccgtcggcgctgaa

SEQ ID NO: 177 - DNA, 25 bp, synthetic construct
  misc_feature 1..25: note = Description of Artificial Sequence: Synthetic oligonucleotide
  source 1..25: mol_type = other DNA
tcccgtcggcgctgaatcctgcgga

SEQ ID NO: 178 - DNA, 25 bp, synthetic construct
  misc_feature 1..25: note = Description of Artificial Sequence: Synthetic oligonucleotide
  source 1..25: mol_type = other DNA
aatcctgcggacgacccttctcggg

SEQ ID NO: 179 - DNA, 25 bp, synthetic construct
  misc_feature 1..25: note = Description of Artificial Sequence: Synthetic oligonucleotide
  source 1..25: mol_type = other DNA
atcctgcggacgacccttctcgggg

SEQ ID NO: 180 - DNA, 25 bp, synthetic construct
  misc_feature 1..25: note = Description of Artificial Sequence: Synthetic oligonucleotide
  source 1..25: mol_type = other DNA
acgacccttctcggggtcgcttggg

SEQ ID NO: 181 - DNA, 25 bp, synthetic construct
  misc_feature 1..25: note = Description of Artificial Sequence: Synthetic oligonucleotide
  source 1..25: mol_type = other DNA
cgacccttctcggggtcgcttggga

SEQ ID NO: 182 - DNA, 25 bp, synthetic construct
  misc_feature 1..25: note = Description of Artificial Sequence: Synthetic oligonucleotide
  source 1..25: mol_type = other DNA
gtctgccgttccgaccgaccacggg

SEQ ID NO: 183 - DNA, 25 bp, synthetic construct
  misc_feature 1..25: note = Description of Artificial Sequence: Synthetic oligonucleotide
  source 1..25: mol_type = other DNA
tctgccgttccgaccgaccacgggg

SEQ ID NO: 184 - DNA, 25 bp, synthetic construct
  misc_feature 1..25: note = Description of Artificial Sequence: Synthetic oligonucleotide
  source 1..25: mol_type = other DNA
cggggcgcacctctctttacgcgga

SEQ ID NO: 185 - DNA, 25 bp, synthetic construct
  misc_feature 1..25: note = Description of Artificial Sequence: Synthetic oligonucleotide
  source 1..25: mol_type = other DNA
cgtctgtgccttctcatctgccgga

SEQ ID NO: 186 - DNA, 25 bp, synthetic construct
  misc_feature 1..25: note = Description of Artificial Sequence: Synthetic oligonucleotide
  source 1..25: mol_type = other DNA
gcttcacctctgcacgtcgcatgga

SEQ ID NO: 187 - DNA, 25 bp, synthetic construct
  misc_feature 1..25: note = Description of Artificial Sequence: Synthetic oligonucleotide
  source 1..25: mol_type = other DNA
cttcacctctgcacgtcgcatggag

SEQ ID NO: 188 - DNA, 25 bp, synthetic construct
  misc_feature 1..25: note = Description of Artificial Sequence: Synthetic oligonucleotide
  source 1..25: mol_type = other DNA
cacgtcgcatggagaccaccgtgaa

SEQ ID NO: 189 - DNA, 25 bp, synthetic construct
  misc_feature 1..25: note = Description of Artificial Sequence: Synthetic oligonucleotide
  source 1..25: mol_type = other DNA
gagaccaccgtgaacgcccaccgaa

SEQ ID NO: 190 - DNA, 25 bp, synthetic construct
  misc_feature 1..25: note = Description of Artificial Sequence: Synthetic oligonucleotide
  source 1..25: mol_type = other DNA
tgttgcccaaggtcttacataagag

SEQ ID NO: 191 - DNA, 25 bp, synthetic construct
  misc_feature 1..25: note = Description of Artificial Sequence: Synthetic oligonucleotide
  source 1..25: mol_type = other DNA
ttgcccaaggtcttacataagagga

SEQ ID NO: 192 - DNA, 25 bp, synthetic construct
  misc_feature 1..25: note = Description of Artificial Sequence: Synthetic oligonucleotide
  source 1..25: mol_type = other DNA
ggtcttacataagaggactcttgga

SEQ ID NO: 193 - DNA, 25 bp, synthetic construct
  misc_feature 1..25: note = Description of Artificial Sequence: Synthetic oligonucleotide
  source 1..25: mol_type = other DNA
tgcaatgtcaacgaccgaccttgag

SEQ ID NO: 194 - DNA, 25 bp, synthetic construct
  misc_feature 1..25: note = Description of Artificial Sequence: Synthetic oligonucleotide
  source 1..25: mol_type = other DNA
aaagactgtttgtttaaagactggg

SEQ ID NO: 195 - DNA, 25 bp, synthetic construct
  misc_feature 1..25: note = Description of Artificial Sequence: Synthetic oligonucleotide
  source 1..25: mol_type = other DNA
aagactgtttgtttaaagactggga

SEQ ID NO: 196 - DNA, 25 bp, synthetic construct
  misc_feature 1..25: note = Description of Artificial Sequence: Synthetic oligonucleotide
  source 1..25: mol_type = other DNA
agactgtttgtttaaagactgggag

SEQ ID NO: 197 - DNA, 25 bp, synthetic construct
  misc_feature 1..25: note = Description of Artificial Sequence: Synthetic oligonucleotide
  source 1..25: mol_type = other DNA
actgtttgtttaaagactgggagga

SEQ ID NO: 198 - DNA, 25 bp, synthetic construct
  misc_feature 1..25: note = Description of Artificial Sequence: Synthetic oligonucleotide
  source 1..25: mol_type = other DNA
ctgtttgtttaaagactgggaggag

SEQ ID NO: 199 - DNA, 25 bp, synthetic construct
  misc_feature 1..25: note = Description of Artificial Sequence: Synthetic oligonucleotide
  source 1..25: mol_type = other DNA
tgtttaaagactgggaggagttggg

SEQ ID NO: 200 - DNA, 25 bp, synthetic construct
  misc_feature 1..25: note = Description of Artificial Sequence: Synthetic oligonucleotide
  source 1..25: mol_type = other DNA
gtttaaagactgggaggagttgggg

SEQ ID NO: 201 - DNA, 25 bp, synthetic construct
  misc_feature 1..25: note = Description of Artificial Sequence: Synthetic oligonucleotide
  source 1..25: mol_type = other DNA
tttaaagactgggaggagttggggg

SEQ ID NO: 202 - DNA, 25 bp, synthetic construct
  misc_feature 1..25: note = Description of Artificial Sequence: Synthetic oligonucleotide
  source 1..25: mol_type = other DNA
ttaaagactgggaggagttggggga

SEQ ID NO: 203 - DNA, 25 bp, synthetic construct
  misc_feature 1..25: note = Description of Artificial Sequence: Synthetic oligonucleotide
  source 1..25: mol_type = other DNA
taaagactgggaggagttgggggag

SEQ ID NO: 204 - DNA, 25 bp, synthetic construct
  misc_feature 1..25: note = Description of Artificial Sequence: Synthetic oligonucleotide
  source 1..25: mol_type = other DNA
aagactgggaggagttgggggagga

SEQ ID NO: 205 - DNA, 25 bp, synthetic construct
  misc_feature 1..25: note = Description of Artificial Sequence: Synthetic oligonucleotide
  source 1..25: mol_type = other DNA
agactgggaggagttgggggaggag

SEQ ID NO: 206 - DNA, 25 bp, synthetic construct
  misc_feature 1..25: note = Description of Artificial Sequence: Synthetic oligonucleotide
  source 1..25: mol_type = other DNA
tagattaaaggtctttgtactagga

SEQ ID NO: 207 - DNA, 25 bp, synthetic construct
  misc_feature 1..25: note = Description of Artificial Sequence: Synthetic oligonucleotide
  source 1..25: mol_type = other DNA
agattaaaggtctttgtactaggag

SEQ ID NO: 208 - DNA, 25 bp, synthetic construct
  misc_feature 1..25: note = Description of Artificial Sequence: Synthetic oligonucleotide
  source 1..25: mol_type = other DNA
tcaagcctccaagctgtgccttggg

SEQ ID NO: 209 - DNA, 25 bp, synthetic construct
  misc_feature 1..25: note = Description of Artificial Sequence: Synthetic oligonucleotide
  source 1..25: mol_type = other DNA
aagctgtgccttgggtggctttggg

SEQ ID NO: 210 - DNA, 25 bp, synthetic construct
  misc_feature 1..25: note = Description of Artificial Sequence: Synthetic oligonucleotide
  source 1..25: mol_type = other DNA
agctgtgccttgggtggctttgggg

SEQ ID NO: 211 - DNA, 25 bp, synthetic construct
  misc_feature 1..25: note = Description of Artificial Sequence: Synthetic oligonucleotide
  source 1..25: mol_type = other DNA
gccttgggtggctttggggcatgga

SEQ ID NO: 212 - DNA, 25 bp, synthetic construct
  misc_feature 1..25: note = Description of Artificial Sequence: Synthetic oligonucleotide
  source 1..25: mol_type = other DNA
catggacatcgacccttataaagaa

SEQ ID NO: 213 - DNA, 25 bp, synthetic construct
  misc_feature 1..25: note = Description of Artificial Sequence: Synthetic oligonucleotide
  source 1..25: mol_type = other DNA
catcgacccttataaagaatttgga

SEQ ID NO: 214 - DNA, 25 bp, synthetic construct
  misc_feature 1..25: note = Description of Artificial Sequence: Synthetic oligonucleotide
  source 1..25: mol_type = other DNA
atcgacccttataaagaatttggag

SEQ ID NO: 215 - DNA, 25 bp, synthetic construct
  misc_feature 1..25: note = Description of Artificial Sequence: Synthetic oligonucleotide
  source 1..25: mol_type = other DNA
ataaagaatttggagctactgtgga

SEQ ID NO: 216 - DNA, 25 bp, synthetic construct
  misc_feature 1..25: note = Description of Artificial Sequence: Synthetic oligonucleotide
  source 1..25: mol_type = other DNA
taaagaatttggagctactgtggag

SEQ ID NO: 217 - DNA, 25 bp, synthetic construct
  misc_feature 1..25: note = Description of Artificial Sequence: Synthetic oligonucleotide
  source 1..25: mol_type = other DNA
tctgacttctttccttcagtacgag

SEQ ID NO: 218 - DNA, 25 bp, synthetic construct
  misc_feature 1..25: note = Description of Artificial Sequence: Synthetic oligonucleotide
  source 1..25: mol_type = other DNA
gataccgcctcagctctgtatcggg

SEQ ID NO: 219 - DNA, 25 bp, synthetic construct
  misc_feature 1..25: note = Description of Artificial Sequence: Synthetic oligonucleotide
  source 1..25: mol_type = other DNA
ataccgcctcagctctgtatcggga

SEQ ID NO: 220 - DNA, 25 bp, synthetic construct
  misc_feature 1..25: note = Description of Artificial Sequence: Synthetic oligonucleotide
  source 1..25: mol_type = other DNA
taccgcctcagctctgtatcgggaa

SEQ ID NO: 221 - DNA, 25 bp, synthetic construct
  misc_feature 1..25: note = Description of Artificial Sequence: Synthetic oligonucleotide
  source 1..25: mol_type = other DNA
agctctgtatcgggaagccttagag

SEQ ID NO: 222 - DNA, 25 bp, synthetic construct
  misc_feature 1..25: note = Description of Artificial Sequence: Synthetic oligonucleotide
  source 1..25: mol_type = other DNA
tcgggaagccttagagtctcctgag

SEQ ID NO: 223 - DNA, 25 bp, synthetic construct
  misc_feature 1..25: note = Description of Artificial Sequence: Synthetic oligonucleotide
  source 1..25: mol_type = other DNA
ctcaggcaagcaattctttgctggg

SEQ ID NO: 224 - DNA, 25 bp, synthetic construct
  misc_feature 1..25: note = Description of Artificial Sequence: Synthetic oligonucleotide
  source 1..25: mol_type = other DNA
tcaggcaagcaattctttgctgggg

SEQ ID NO: 225 - DNA, 25 bp, synthetic construct
  misc_feature 1..25: note = Description of Artificial Sequence: Synthetic oligonucleotide
  source 1..25: mol_type = other DNA
caggcaagcaattctttgctggggg

SEQ ID NO: 226 - DNA, 25 bp, synthetic construct
  misc_feature 1..25: note = Description of Artificial Sequence: Synthetic oligonucleotide
  source 1..25: mol_type = other DNA
aggcaagcaattctttgctgggggg

SEQ ID NO: 227 - DNA, 25 bp, synthetic construct
  misc_feature 1..25: note = Description of Artificial Sequence: Synthetic oligonucleotide
  source 1..25: mol_type = other DNA
ggcaagcaattctttgctgggggga

SEQ ID NO: 228 - DNA, 25 bp, synthetic construct
  misc_feature 1..25: note = Description of Artificial Sequence: Synthetic oligonucleotide
  source 1..25: mol_type = other DNA
gcaagcaattctttgctggggggaa

SEQ ID NO: 229 - DNA, 25 bp, synthetic construct
  misc_feature 1..25: note = Description of Artificial Sequence: Synthetic oligonucleotide
  source 1..25: mol_type = other DNA
gaactaatgactctagctacctggg

SEQ ID NO: 230 - DNA, 25 bp, synthetic construct
  misc_feature 1..25: note = Description of Artificial Sequence: Synthetic oligonucleotide
  source 1..25: mol_type = other DNA
taatgactctagctacctgggtggg

SEQ ID NO: 231 - DNA, 25 bp, synthetic construct
  misc_feature 1..25: note = Description of Artificial Sequence: Synthetic oligonucleotide
  source 1..25: mol_type = other DNA
ctacctgggtgggtgttaatttgga

SEQ ID NO: 232 - DNA, 25 bp, synthetic construct
  misc_feature 1..25: note = Description of Artificial Sequence: Synthetic oligonucleotide
  source 1..25: mol_type = other DNA
tacctgggtgggtgttaatttggaa

SEQ ID NO: 233 - DNA, 25 bp, synthetic construct
  misc_feature 1..25: note = Description of Artificial Sequence: Synthetic oligonucleotide
  source 1..25: mol_type = other DNA
aatttggaagatccagcatctagag

SEQ ID NO: 234 - DNA, 25 bp, synthetic construct
  misc_feature 1..25: note = Description of Artificial Sequence: Synthetic oligonucleotide
  source 1..25: mol_type = other DNA
tcagttatgtcaacactaatatggg

SEQ ID NO: 235 - DNA, 25 bp, synthetic construct
  misc_feature 1..25: note = Description of Artificial Sequence: Synthetic oligonucleotide
  source 1..25: mol_type = other DNA
tcacatttcttgtctcacttttgga

SEQ ID NO: 236 - DNA, 25 bp, synthetic construct
  misc_feature 1..25: note = Description of Artificial Sequence: Synthetic oligonucleotide
  source 1..25: mol_type = other DNA
cacatttcttgtctcacttttggaa

SEQ ID NO: 237 - DNA, 25 bp, synthetic construct
  misc_feature 1..25: note = Description of Artificial Sequence: Synthetic oligonucleotide
  source 1..25: mol_type = other DNA
atttcttgtctcacttttggaagag

SEQ ID NO: 238 - DNA, 25 bp, synthetic construct
  misc_feature 1..25: note = Description of Artificial Sequence: Synthetic oligonucleotide
  source 1..25: mol_type = other DNA
ttcttgtctcacttttggaagagaa

SEQ ID NO: 239 - DNA, 25 bp, synthetic construct
  misc_feature 1..25: note = Description of Artificial Sequence: Synthetic oligonucleotide
  source 1..25: mol_type = other DNA
ttttggaagagaaaccgttatagag

SEQ ID NO: 240 - DNA, 25 bp, synthetic construct
  misc_feature 1..25: note = Description of Artificial Sequence: Synthetic oligonucleotide
  source 1..25: mol_type = other DNA
tatagagtatttggtgtctttcgga

SEQ ID NO: 241 - DNA, 25 bp, synthetic construct
  misc_feature 1..25: note = Description of Artificial Sequence: Synthetic oligonucleotide
  source 1..25: mol_type = other DNA
atagagtatttggtgtctttcggag

SEQ ID NO: 242 - DNA, 25 bp, synthetic construct
  misc_feature 1..25: note = Description of Artificial Sequence: Synthetic oligonucleotide
  source 1..25: mol_type = other DNA
tatttggtgtctttcggagtgtgga

SEQ ID NO: 243 - DNA, 25 bp, synthetic construct
  misc_feature 1..25: note = Description of Artificial Sequence: Synthetic oligonucleotide
  source 1..25: mol_type = other DNA
cccctatcctatcaacacttccgga

SEQ ID NO: 244 - DNA, 25 bp, synthetic construct
  misc_feature 1..25: note = Description of Artificial Sequence: Synthetic oligonucleotide
  source 1..25: mol_type = other DNA
ccctatcctatcaacacttccggaa

SEQ ID NO: 245 - DNA, 25 bp, synthetic construct
  misc_feature 1..25: note = Description of Artificial Sequence: Synthetic oligonucleotide
  source 1..25: mol_type = other DNA
gaaactactgttgttagacgacgag

SEQ ID NO: 246 - DNA, 25 bp, synthetic construct
  misc_feature 1..25: note = Description of Artificial Sequence: Synthetic oligonucleotide
  source 1..25: mol_type = other DNA
agacgacgaggcaggtcccctagaa

SEQ ID NO: 247 - DNA, 25 bp, synthetic construct
  misc_feature 1..25: note = Description of Artificial Sequence: Synthetic oligonucleotide
  source 1..25: mol_type = other DNA
cgacgaggcaggtcccctagaagaa

SEQ ID NO: 248 - DNA, 25 bp, synthetic construct
  misc_feature 1..25: note = Description of Artificial Sequence: Synthetic oligonucleotide
  source 1..25: mol_type = other DNA
cgaggcaggtcccctagaagaagaa

SEQ ID NO: 249 - DNA, 25 bp, synthetic construct
  misc_feature 1..25: note = Description of Artificial Sequence: Synthetic oligonucleotide
  source 1..25: mol_type = other DNA
agaactccctcgcctcgcagacgaa

SEQ ID NO: 250 - DNA, 25 bp, synthetic construct
  misc_feature 1..25: note = Description of Artificial Sequence: Synthetic oligonucleotide
  source 1..25: mol_type = other DNA
aggtctcaatcgccgcgtcgcagaa

SEQ ID NO: 251 - DNA, 25 bp, synthetic construct
  misc_feature 1..25: note = Description of Artificial Sequence: Synthetic oligonucleotide
  source 1..25: mol_type = other DNA
cgtcgcagaagatctcaatctcggg

SEQ ID NO: 252 - DNA, 25 bp, synthetic construct
  misc_feature 1..25: note = Description of Artificial Sequence: Synthetic oligonucleotide
  source 1..25: mol_type = other DNA
gtcgcagaagatctcaatctcggga

SEQ ID NO: 253 - DNA, 25 bp, synthetic construct
  misc_feature 1..25: note = Description of Artificial Sequence: Synthetic oligonucleotide
  source 1..25: mol_type = other DNA
tcgcagaagatctcaatctcgggaa

SEQ ID NO: 254 - DNA, 25 bp, synthetic construct
  misc_feature 1..25: note = Description of Artificial Sequence: Synthetic oligonucleotide
  source 1..25: mol_type = other DNA
aacctcaatgttagtattccttgga

SEQ ID NO: 255 - DNA, 25 bp, synthetic construct
  misc_feature 1..25: note = Description of Artificial Sequence: Synthetic oligonucleotide
  source 1..25: mol_type = other DNA
gtattccttggactcataaggtggg

SEQ ID NO: 256 - DNA, 25 bp, synthetic construct
  misc_feature 1..25: note = Description of Artificial Sequence: Synthetic oligonucleotide
  source 1..25: mol_type = other DNA
tattccttggactcataaggtgggg

SEQ ID NO: 257 - DNA, 25 bp, synthetic construct
  misc_feature 1..25: note = Description of Artificial Sequence: Synthetic oligonucleotide
  source 1..25: mol_type = other DNA
attccttggactcataaggtgggga

SEQ ID NO: 258 - DNA, 25 bp, synthetic construct
  misc_feature 1..25: note = Description of Artificial Sequence: Synthetic oligonucleotide
  source 1..25: mol_type = other DNA
ttccttggactcataaggtggggaa

SEQ ID NO: 259 - DNA, 25 bp, synthetic construct
  misc_feature 1..25: note = Description of Artificial Sequence: Synthetic oligonucleotide
  source 1..25: mol_type = other DNA
gtacctgtctttaatcctcattgga

SEQ ID NO: 260 - DNA, 25 bp, synthetic construct
  misc_feature 1..25: note = Description of Artificial Sequence: Synthetic oligonucleotide
  source 1..25: mol_type = other DNA
tacctgtctttaatcctcattggaa

SEQ ID NO: 261 - DNA, 25 bp, synthetic construct
  misc_feature 1..25: note = Description of Artificial Sequence: Synthetic oligonucleotide
  source 1..25: mol_type = other DNA
ccaagacattatcaaaaaatgtgaa

SEQ ID NO: 262 - DNA, 25 bp, synthetic construct
  misc_feature 1..25: note = Description of Artificial Sequence: Synthetic oligonucleotide
  source 1..25: mol_type = other DNA
tgtaggcccacttacagttaatgag

SEQ ID NO: 263 - DNA, 25 bp, synthetic construct
  misc_feature 1..25: note = Description of Artificial Sequence: Synthetic oligonucleotide
  source 1..25: mol_type = other DNA
taggcccacttacagttaatgagaa

SEQ ID NO: 264 - DNA, 25 bp, synthetic construct
  misc_feature 1..25: note = Description of Artificial Sequence: Synthetic oligonucleotide
  source 1..25: mol_type = other DNA
ccacttacagttaatgagaaaagaa

SEQ ID NO: 265 - DNA, 25 bp, synthetic construct
  misc_feature 1..25: note = Description of Artificial Sequence: Synthetic oligonucleotide
  source 1..25: mol_type = other DNA
aggttaccaaatatttaccattgga

SEQ ID NO: 266 - DNA, 25 bp, synthetic construct
  misc_feature 1..25: note = Description of Artificial Sequence: Synthetic oligonucleotide
  source 1..25: mol_type = other DNA
ccaaatatttaccattggataaggg

SEQ ID NO: 267 - DNA, 25 bp, synthetic construct
  misc_feature 1..25: note = Description of Artificial Sequence: Synthetic oligonucleotide
  source 1..25: mol_type = other DNA
gggtattaaaccttattatccagaa

SEQ ID NO: 268 - DNA, 25 bp, synthetic construct
  misc_feature 1..25: note = Description of Artificial Sequence: Synthetic oligonucleotide
  source 1..25: mol_type = other DNA
agacactatttacacactctatgga

SEQ ID NO: 269 - DNA, 25 bp, synthetic construct
  misc_feature 1..25: note = Description of Artificial Sequence: Synthetic oligonucleotide
  source 1..25: mol_type = other DNA
gacactatttacacactctatggaa

SEQ ID NO: 270 - DNA, 25 bp, synthetic construct
  misc_feature 1..25: note = Description of Artificial Sequence: Synthetic oligonucleotide
  source 1..25: mol_type = other DNA
atttacacactctatggaaggcggg

SEQ ID NO: 271 - DNA, 25 bp, synthetic construct
  misc_feature 1..25: note = Description of Artificial Sequence: Synthetic oligonucleotide
  source 1..25: mol_type = other DNA
ggaaggcgggtatattatataagag

SEQ ID NO: 272 - DNA, 25 bp, synthetic construct
  misc_feature 1..25: note = Description of Artificial Sequence: Synthetic oligonucleotide
  source 1..25: mol_type = other DNA
aaggcgggtatattatataagagag

SEQ ID NO: 273 - DNA, 25 bp, synthetic construct
  misc_feature 1..25: note = Description of Artificial Sequence: Synthetic oligonucleotide
  source 1..25: mol_type = other DNA
ggcgggtatattatataagagagaa

SEQ ID NO: 274 - DNA, 25 bp, synthetic construct
  misc_feature 1..25: note = Description of Artificial Sequence: Synthetic oligonucleotide
  source 1..25: mol_type = other DNA
aacacatagcgcctcattttgtggg

SEQ ID NO: 275 - DNA, 25 bp, synthetic construct
  misc_feature 1..25: note = Description of Artificial Sequence: Synthetic oligonucleotide
  source 1..25: mol_type = other DNA
ttttgtgggtcaccatattcttggg

SEQ ID NO: 276 - DNA, 25 bp, synthetic construct
  misc_feature 1..25: note = Description of Artificial Sequence: Synthetic oligonucleotide
  source 1..25: mol_type = other DNA
tttgtgggtcaccatattcttggga

SEQ ID NO: 277 - DNA, 25 bp, synthetic construct
  misc_feature 1..25: note = Description of Artificial Sequence: Synthetic oligonucleotide
  source 1..25: mol_type = other DNA
ttgtgggtcaccatattcttgggaa

SEQ ID NO: 278 - DNA, 25 bp, synthetic construct
  misc_feature 1..25: note = Description of Artificial Sequence: Synthetic oligonucleotide
  source 1..25: mol_type = other DNA
ttgggaacaagatctacagcatggg

SEQ ID NO: 279 - DNA, 25 bp, synthetic construct
  misc_feature 1..25: note = Description of Artificial Sequence: Synthetic oligonucleotide
  source 1..25: mol_type = other DNA
tgggaacaagatctacagcatgggg

SEQ ID NO: 280 - DNA, 25 bp, synthetic construct
  misc_feature 1..25: note = Description of Artificial Sequence: Synthetic oligonucleotide
  source 1..25: mol_type = other DNA
acaagatctacagcatggggcagaa

SEQ ID NO: 281 - DNA, 25 bp, synthetic construct
  misc_feature 1..25: note = Description of Artificial Sequence: Synthetic oligonucleotide
  source 1..25: mol_type = other DNA
atctttccaccagcaatcctctggg

SEQ ID NO: 282 - DNA, 25 bp, synthetic construct
  misc_feature 1..25: note = Description of Artificial Sequence: Synthetic oligonucleotide
  source 1..25: mol_type = other DNA
tctttccaccagcaatcctctggga

SEQ ID NO: 283 - DNA, 25 bp, synthetic construct
  misc_feature 1..25: note = Description of Artificial Sequence: Synthetic oligonucleotide
  source 1..25: mol_type = other DNA
gattctttcccgaccaccagttgga

SEQ ID NO: 284 - DNA, 25 bp, synthetic construct
  misc_feature 1..25: note = Description of Artificial Sequence: Synthetic oligonucleotide
  source 1..25: mol_type = other DNA
caccagttggatccagccttcagag

SEQ ID NO: 285 - DNA, 25 bp, synthetic construct
  misc_feature 1..25: note = Description of Artificial Sequence: Synthetic oligonucleotide
  source 1..25: mol_type = other DNA
gcaaacacagcaaatccagattggg

SEQ ID NO: 286 - DNA, 25 bp, synthetic construct
  misc_feature 1..25: note = Description of Artificial Sequence: Synthetic oligonucleotide
  source 1..25: mol_type = other DNA
caaacacagcaaatccagattggga

SEQ ID NO: 287 - DNA, 25 bp, synthetic construct
  misc_feature 1..25: note = Description of Artificial Sequence: Synthetic oligonucleotide
  source 1..25: mol_type = other DNA
attgggacttcaatcccaacaagga

SEQ ID NO: 288 - DNA, 25 bp, synthetic construct
  misc_feature 1..25: note = Description of Artificial Sequence: Synthetic oligonucleotide
  source 1..25: mol_type = other DNA
ctggccagacgccaacaaggtagga

SEQ ID NO: 289 - DNA, 25 bp, synthetic construct
  misc_feature 1..25: note = Description of Artificial Sequence: Synthetic oligonucleotide
  source 1..25: mol_type = other DNA
tggccagacgccaacaaggtaggag

SEQ ID NO: 290 - DNA, 25 bp, synthetic construct
  misc_feature 1..25: note = Description of Artificial Sequence: Synthetic oligonucleotide
  source 1..25: mol_type = other DNA
agacgccaacaaggtaggagctgga

SEQ ID NO: 291 - DNA, 25 bp, synthetic construct
  misc_feature 1..25: note = Description of Artificial Sequence: Synthetic oligonucleotide
  source 1..25: mol_type = other DNA
gacgccaacaaggtaggagctggag

SEQ ID NO: 292 - DNA, 25 bp, synthetic construct
  misc_feature 1..25: note = Description of Artificial Sequence: Synthetic oligonucleotide
  source 1..25: mol_type = other DNA
caaggtaggagctggagcattcggg

SEQ ID NO: 293 - DNA, 25 bp, synthetic construct
  misc_feature 1..25: note = Description of Artificial Sequence: Synthetic oligonucleotide
  source 1..25: mol_type = other DNA
taggagctggagcattcgggctggg

SEQ ID NO: 294 - DNA, 25 bp, synthetic construct
  misc_feature 1..25: note = Description of Artificial Sequence: Synthetic oligonucleotide
  source 1..25: mol_type = other DNA
gctgggtttcaccccaccgcacgga

SEQ ID NO: 295 - DNA, 25 bp, synthetic construct
  misc_feature 1..25: note = Description of Artificial Sequence: Synthetic oligonucleotide
  source 1..25: mol_type = other DNA
ctgggtttcaccccaccgcacggag

SEQ ID NO: 296 - DNA, 25 bp, synthetic construct
  misc_feature 1..25: note = Description of Artificial Sequence: Synthetic oligonucleotide
  source 1..25: mol_type = other DNA
ccccaccgcacggaggccttttggg

SEQ ID NO: 297 - DNA, 25 bp, synthetic construct
  misc_feature 1..25: note = Description of Artificial Sequence: Synthetic oligonucleotide
  source 1..25: mol_type = other DNA
cccaccgcacggaggccttttgggg

SEQ ID NO: 298 - DNA, 25 bp, synthetic construct
  misc_feature 1..25: note = Description of Artificial Sequence: Synthetic oligonucleotide
  source 1..25: mol_type = other DNA
ccgcacggaggccttttggggtgga

SEQ ID NO: 299 - DNA, 25 bp, synthetic construct
  misc_feature 1..25: note = Description of Artificial Sequence: Synthetic oligonucleotide
  source 1..25: mol_type = other DNA
cgcacggaggccttttggggtggag

SEQ ID NO: 300 - DNA, 25 bp, synthetic construct
  misc_feature 1..25: note = Description of Artificial Sequence: Synthetic oligonucleotide
  source 1..25: mol_type = other DNA
tggggtggagccctcaggctcaggg

SEQ ID NO: 301 - DNA, 25 bp, synthetic construct
  misc_feature 1..25: note = Description of Artificial Sequence: Synthetic oligonucleotide
  source 1..25: mol_type = other DNA
tgcctccaccaatcgccagacagga

SEQ ID NO: 302 - DNA, 25 bp, synthetic construct
  misc_feature 1..25: note = Description of Artificial Sequence: Synthetic oligonucleotide
  source 1..25: mol_type = other DNA
gcctccaccaatcgccagacaggaa

SEQ ID NO: 303 - DNA, 25 bp, synthetic construct
  misc_feature 1..25: note = Description of Artificial Sequence: Synthetic oligonucleotide
  source 1..25: mol_type = other DNA
ctaccccgctgtctccacctttgag

SEQ ID NO: 304 - DNA, 25 bp, synthetic construct
  misc_feature 1..25: note = Description of Artificial Sequence: Synthetic oligonucleotide
  source 1..25: mol_type = other DNA
accccgctgtctccacctttgagaa

SEQ ID NO: 305 - DNA, 17 bp, synthetic construct
  misc_feature 1..17: note = Description of Artificial Sequence: Synthetic oligonucleotide
  source 1..17: mol_type = other DNA
gaaaggttgtggaattt

SEQ ID NO: 306 - DNA, 19 bp, synthetic construct
  misc_feature 1..19: note = Description of Artificial Sequence: Synthetic oligonucleotide
  source 1..19: mol_type = other DNA
gtgaaaggttgtggaattc

SEQ ID NO: 307 - DNA, 23 bp, synthetic construct
  misc_feature 1..23: note = Description of Artificial Sequence: Synthetic oligonucleotide
  source 1..23: mol_type = other DNA
tttggtgaaaggttgtggaatta

SEQ ID NO: 308 - DNA, 25 bp, synthetic construct
  misc_feature 1..25: note = Description of Artificial Sequence: Synthetic oligonucleotide
  source 1..25: mol_type = other DNA
aggatgagtgtttctcaaaggtgga

SEQ ID NO: 309 - DNA, 25 bp, synthetic construct
  misc_feature 1..25: note = Description of Artificial Sequence: Synthetic oligonucleotide
  source 1..25: mol_type = other DNA
ggatgagtgtttctcaaaggtggag

SEQ ID NO: 310 - DNA, 25 bp, synthetic construct
  misc_feature 1..25: note = Description of Artificial Sequence: Synthetic oligonucleotide
  source 1..25: mol_type = other DNA
gtttctcaaaggtggagacagcggg

SEQ ID NO: 311 - DNA, 25 bp, synthetic construct
  misc_feature 1..25: note = Description of Artificial Sequence: Synthetic oligonucleotide
  source 1..25: mol_type = other DNA
tttctcaaaggtggagacagcgggg

SEQ ID NO: 312 - DNA, 25 bp, synthetic construct
  misc_feature 1..25: note = Description of Artificial Sequence: Synthetic oligonucleotide
  source 1..25: mol_type = other DNA
gccttcctgtctggcgattggtgga

SEQ ID NO: 313 - DNA, 25 bp, synthetic construct
  misc_feature 1..25: note = Description of Artificial Sequence: Synthetic oligonucleotide
  source 1..25: mol_type = other DNA
ccttcctgtctggcgattggtggag

SEQ ID NO: 314 - DNA, 25 bp, synthetic construct
  misc_feature 1..25: note = Description of Artificial Sequence: Synthetic oligonucleotide
  source 1..25: mol_type = other DNA
tgtctggcgattggtggaggcagga

SEQ ID NO: 315 - DNA, 25 bp, synthetic construct
  misc_feature 1..25: note = Description of Artificial Sequence: Synthetic oligonucleotide
  source 1..25: mol_type = other DNA
gtctggcgattggtggaggcaggag

SEQ ID NO: 316 - DNA, 25 bp, synthetic construct
  misc_feature 1..25: note = Description of Artificial Sequence: Synthetic oligonucleotide
  source 1..25: mol_type = other DNA
gcgattggtggaggcaggaggcgga

SEQ ID NO: 317 - DNA, 25 bp, synthetic construct
  misc_feature 1..25: note = Description of Artificial Sequence: Synthetic oligonucleotide
  source 1..25: mol_type = other DNA
ggcaaagtttgtagtatgccctgag

SEQ ID NO: 318 - DNA, 25 bp, synthetic construct
  misc_feature 1..25: note = Description of Artificial Sequence: Synthetic oligonucleotide
  source 1..25: mol_type = other DNA
gtttgtagtatgccctgagcctgag

SEQ ID NO: 319 - DNA, 25 bp, synthetic construct
  misc_feature 1..25: note = Description of Artificial Sequence: Synthetic oligonucleotide
  source 1..25: mol_type = other DNA
ttgtagtatgccctgagcctgaggg

SEQ ID NO: 320 - DNA, 25 bp, synthetic construct
  misc_feature 1..25: note = Description of Artificial Sequence: Synthetic oligonucleotide
  source 1..25: mol_type = other DNA
ccccaaaaggcctccgtgcggtggg

SEQ ID NO: 321 - DNA, 25 bp, synthetic construct
  misc_feature 1..25: note = Description of Artificial Sequence: Synthetic oligonucleotide
  source 1..25: mol_type = other DNA
cccaaaaggcctccgtgcggtgggg

SEQ ID NO: 322 - DNA, 25 bp, synthetic construct
  misc_feature 1..25: note = Description of Artificial Sequence: Synthetic oligonucleotide
  source 1..25: mol_type = other DNA
aaaggcctccgtgcggtggggtgaa

SEQ ID NO: 323 - DNA, 25 bp, synthetic construct
  misc_feature 1..25: note = Description of Artificial Sequence: Synthetic oligonucleotide
  source 1..25: mol_type = other DNA
gcggtggggtgaaacccagcccgaa

SEQ ID NO: 324 - DNA, 25 bp, synthetic construct
  misc_feature 1..25: note = Description of Artificial Sequence: Synthetic oligonucleotide
  source 1..25: mol_type = other DNA
cgtctggccaggtgtccttgttggg

SEQ ID NO: 325 - DNA, 25 bp, synthetic construct
  misc_feature 1..25: note = Description of Artificial Sequence: Synthetic oligonucleotide
  source 1..25: mol_type = other DNA
gtctggccaggtgtccttgttggga

SEQ ID NO: 326 - DNA, 25 bp, synthetic construct
  misc_feature 1..25: note = Description of Artificial Sequence: Synthetic oligonucleotide
  source 1..25: mol_type = other DNA
gccaggtgtccttgttgggattgaa

SEQ ID NO: 327 - DNA, 25 bp, synthetic construct
  misc_feature 1..25: note = Description of Artificial Sequence: Synthetic oligonucleotide
  source 1..25: mol_type = other DNA
gttgggattgaagtcccaatctgga

SEQ ID NO: 328 - DNA, 25 bp, synthetic construct
  misc_feature 1..25: note = Description of Artificial Sequence: Synthetic oligonucleotide
  source 1..25: mol_type = other DNA
ctggatttgctgtgtttgctctgaa

SEQ ID NO: 329 - DNA, 25 bp, synthetic construct
  misc_feature 1..25: note = Description of Artificial Sequence: Synthetic oligonucleotide
  source 1..25: mol_type = other DNA
tgctgtgtttgctctgaaggctgga

SEQ ID NO: 330 - DNA, 25 bp, synthetic construct
  misc_feature 1..25: note = Description of Artificial Sequence: Synthetic oligonucleotide
  source 1..25: mol_type = other DNA
aggctggatccaactggtggtcggg

SEQ ID NO: 331 - DNA, 25 bp, synthetic construct
  misc_feature 1..25: note = Description of Artificial Sequence: Synthetic oligonucleotide
  source 1..25: mol_type = other DNA
ggctggatccaactggtggtcggga

SEQ ID NO: 332 - DNA, 25 bp, synthetic construct
  misc_feature 1..25: note = Description of Artificial Sequence: Synthetic oligonucleotide
  source 1..25: mol_type = other DNA
gctggatccaactggtggtcgggaa

SEQ ID NO: 333 - DNA, 25 bp, synthetic construct
  misc_feature 1..25: note = Description of Artificial Sequence: Synthetic oligonucleotide
  source 1..25: mol_type = other DNA
gatccaactggtggtcgggaaagaa

SEQ ID NO: 334 - DNA, 25 bp, synthetic construct
  misc_feature 1..25: note = Description of Artificial Sequence: Synthetic oligonucleotide
  source 1..25: mol_type = other DNA
tggtggtcgggaaagaatcccagag

SEQ ID NO: 335 - DNA, 25 bp, synthetic construct
  misc_feature 1..25: note = Description of Artificial Sequence: Synthetic oligonucleotide
  source 1..25: mol_type = other DNA
gtggtcgggaaagaatcccagagga

SEQ ID NO: 336 - DNA, 25 bp, synthetic construct
  misc_feature 1..25: note = Description of Artificial Sequence: Synthetic oligonucleotide
  source 1..25: mol_type = other DNA
agaatcccagaggattgctggtgga

SEQ ID NO: 337 - DNA, 25 bp, synthetic construct
  misc_feature 1..25: note = Description of Artificial Sequence: Synthetic oligonucleotide
  source 1..25: mol_type = other DNA
gaatcccagaggattgctggtggaa

SEQ ID NO: 338 - DNA, 25 bp, synthetic construct
  misc_feature 1..25: note = Description of Artificial Sequence: Synthetic oligonucleotide
  source 1..25: mol_type = other DNA
atgctgtagatcttgttcccaagaa

SEQ ID NO: 339 - DNA, 25 bp, synthetic construct
  misc_feature 1..25: note = Description of Artificial Sequence: Synthetic oligonucleotide
  source 1..25: mol_type = other DNA
agaatatggtgacccacaaaatgag

SEQ ID NO: 340 - DNA, 25 bp, synthetic construct
  misc_feature 1..25: note = Description of Artificial Sequence: Synthetic oligonucleotide
  source 1..25: mol_type = other DNA
tataatatacccgccttccatagag

SEQ ID NO: 341 - DNA, 25 bp, synthetic construct
  misc_feature 1..25: note = Description of Artificial Sequence: Synthetic oligonucleotide
  source 1..25: mol_type = other DNA
gtgtgtaaatagtgtctagtttgga

SEQ ID NO: 342 - DNA, 25 bp, synthetic construct
  misc_feature 1..25: note = Description of Artificial Sequence: Synthetic oligonucleotide
  source 1..25: mol_type = other DNA
tgtgtaaatagtgtctagtttggaa

SEQ ID NO: 343 - DNA, 25 bp, synthetic construct
  misc_feature 1..25: note = Description of Artificial Sequence: Synthetic oligonucleotide
  source 1..25: mol_type = other DNA
gtaatgattaactagatgttctgga

SEQ ID NO: 344 - DNA, 25 bp, synthetic construct
  misc_feature 1..25: note = Description of Artificial Sequence: Synthetic oligonucleotide
  source 1..25: mol_type = other DNA
tggtaaatatttggtaacctttgga

SEQ ID NO: 345 - DNA, 25 bp, synthetic construct
  misc_feature 1..25: note = Description of Artificial Sequence: Synthetic oligonucleotide
  source 1..25: mol_type = other DNA
tcttttctcattaactgtaagtggg

SEQ ID NO: 346 - DNA, 25 bp, synthetic construct
  misc_feature 1..25: note = Description of Artificial Sequence: Synthetic oligonucleotide
  source 1..25: mol_type = other DNA
gtcttggtgtaaatgtatattagga

SEQ ID NO: 347 - DNA, 25 bp, synthetic construct
  misc_feature 1..25: note = Description of Artificial Sequence: Synthetic oligonucleotide
  source 1..25: mol_type = other DNA
tcttggtgtaaatgtatattaggaa

SEQ ID NO: 348 - DNA, 25 bp, synthetic construct
  misc_feature 1..25: note = Description of Artificial Sequence: Synthetic oligonucleotide
  source 1..25: mol_type = other DNA
ggaaaagatggtgttttccaatgag

SEQ ID NO: 349 - DNA, 25 bp, synthetic construct
  misc_feature 1..25: note = Description of Artificial Sequence: Synthetic oligonucleotide
  source 1..25: mol_type = other DNA
aaaagatggtgttttccaatgagga

SEQ ID NO: 350 - DNA, 25 bp, synthetic construct
  misc_feature 1..25: note = Description of Artificial Sequence: Synthetic oligonucleotide
  source 1..25: mol_type = other DNA
aggattaaagacaggtacagtagaa

SEQ ID NO: 351 - DNA, 25 bp, synthetic construct
  misc_feature 1..25: note = Description of Artificial Sequence: Synthetic oligonucleotide
  source 1..25: mol_type = other DNA
attaaagacaggtacagtagaagaa

SEQ ID NO: 352 - DNA, 25 bp, synthetic construct
  misc_feature 1..25: note = Description of Artificial Sequence: Synthetic oligonucleotide
  source 1..25: mol_type = other DNA
ccagtaaagttccccaccttatgag

SEQ ID NO: 353 - DNA, 25 bp, synthetic construct
  misc_feature 1..25: note = Description of Artificial Sequence: Synthetic oligonucleotide
  source 1..25: mol_type = other DNA
gttccccaccttatgagtccaagga

SEQ ID NO: 354 - DNA, 25 bp, synthetic construct
  misc_feature 1..25: note = Description of Artificial Sequence: Synthetic oligonucleotide
  source 1..25: mol_type = other DNA
ttccccaccttatgagtccaaggaa

SEQ ID NO: 355 - DNA, 25 bp, synthetic construct
  misc_feature 1..25: note = Description of Artificial Sequence: Synthetic oligonucleotide
  source 1..25: mol_type = other DNA
gagtccaaggaatactaacattgag

SEQ ID NO: 356 - DNA, 25 bp, synthetic construct
  misc_feature 1..25: note = Description of Artificial Sequence: Synthetic oligonucleotide
  source 1..25: mol_type = other DNA
gaatactaacattgaggttcccgag

SEQ ID NO: 357 - DNA, 25 bp, synthetic construct
  misc_feature 1..25: note = Description of Artificial Sequence: Synthetic oligonucleotide
  source 1..25: mol_type = other DNA
taacattgaggttcccgagattgag

SEQ ID NO: 358 - DNA, 25 bp, synthetic construct
  misc_feature 1..25: note = Description of Artificial Sequence: Synthetic oligonucleotide
  source 1..25: mol_type = other DNA
gatcttctgcgacgcggcgattgag

SEQ ID NO: 359 - DNA, 25 bp, synthetic construct
  misc_feature 1..25: note = Description of Artificial Sequence: Synthetic oligonucleotide
  source 1..25: mol_type = other DNA
ggcgattgagaccttcgtctgcgag

SEQ ID NO: 360 - DNA, 25 bp, synthetic construct
  misc_feature 1..25: note = Description of Artificial Sequence: Synthetic oligonucleotide
  source 1..25: mol_type = other DNA
ttgagaccttcgtctgcgaggcgag

SEQ ID NO: 361 - DNA, 25 bp, synthetic construct
  misc_feature 1..25: note = Description of Artificial Sequence: Synthetic oligonucleotide
  source 1..25: mol_type = other DNA
gagaccttcgtctgcgaggcgaggg

SEQ ID NO: 362 - DNA, 25 bp, synthetic construct
  misc_feature 1..25: note = Description of Artificial Sequence: Synthetic oligonucleotide
  source 1..25: mol_type = other DNA
agaccttcgtctgcgaggcgaggga

SEQ ID NO: 363 - DNA, 25 bp, synthetic construct
  misc_feature 1..25: note = Description of Artificial Sequence: Synthetic oligonucleotide
  source 1..25: mol_type = other DNA
gaccttcgtctgcgaggcgagggag

SEQ ID NO: 364 - DNA, 25 bp, synthetic construct
  misc_feature 1..25: note = Description of Artificial Sequence: Synthetic oligonucleotide
  source 1..25: mol_type = other DNA
aggcgagggagttcttcttctaggg

SEQ ID NO: 365 - DNA, 25 bp, synthetic construct
  misc_feature 1..25: note = Description of Artificial Sequence: Synthetic oligonucleotide
  source 1..25: mol_type = other DNA
ggcgagggagttcttcttctagggg

SEQ ID NO: 366 - DNA, 25 bp, synthetic construct
  misc_feature 1..25: note = Description of Artificial Sequence: Synthetic oligonucleotide
  source 1..25: mol_type = other DNA
gcgagggagttcttcttctagggga

SEQ ID NO: 367 - DNA, 25 bp, synthetic construct
  misc_feature 1..25: note = Description of Artificial Sequence: Synthetic oligonucleotide
  source 1..25: mol_type = other DNA
tcgtctaacaacagtagtttccgga

SEQ ID NO: 368 - DNA, 25 bp, synthetic construct
  misc_feature 1..25: note = Description of Artificial Sequence: Synthetic oligonucleotide
  source 1..25: mol_type = other DNA
cgtctaacaacagtagtttccggaa

SEQ ID NO: 369 - DNA, 25 bp, synthetic construct
  misc_feature 1..25: note = Description of Artificial Sequence: Synthetic oligonucleotide
  source 1..25: mol_type = other DNA
gtagtttccggaagtgttgatagga

SEQ ID NO: 370 - DNA, 25 bp, synthetic construct
  misc_feature 1..25: note = Description of Artificial Sequence: Synthetic oligonucleotide
  source 1..25: mol_type = other DNA
ttccggaagtgttgataggataggg

SEQ ID NO: 371 - DNA, 25 bp, synthetic construct
  misc_feature 1..25: note = Description of Artificial Sequence: Synthetic oligonucleotide
  source 1..25: mol_type = other DNA
tccggaagtgttgataggatagggg

SEQ ID NO: 372 - DNA, 25 bp, synthetic construct
  misc_feature 1..25: note = Description of Artificial Sequence: Synthetic oligonucleotide
  source 1..25: mol_type = other DNA
ggcatttggtggtctataagctgga

SEQ ID NO: 373 - DNA, 25 bp, synthetic construct
  misc_feature 1..25: note = Description of Artificial Sequence: Synthetic oligonucleotide
  source 1..25: mol_type = other DNA
gcatttggtggtctataagctggag

SEQ ID NO: 374 - DNA, 25 bp, synthetic construct
  misc_feature 1..25: note = Description of Artificial Sequence: Synthetic oligonucleotide
  source 1..25: mol_type = other DNA
atttggtggtctataagctggagga

SEQ ID NO: 375 - DNA, 25 bp, synthetic construct
  misc_feature 1..25: note = Description of Artificial Sequence: Synthetic oligonucleotide
  source 1..25: mol_type = other DNA
tttggtggtctataagctggaggag

SEQ ID NO: 376 - DNA, 25 bp, synthetic construct
  misc_feature 1..25: note = Description of Artificial Sequence: Synthetic oligonucleotide
  source 1..25: mol_type = other DNA
ggtctataagctggaggagtgcgaa

SEQ ID NO: 377 - DNA, 25 bp, synthetic construct
  misc_feature 1..25: note = Description of Artificial Sequence: Synthetic oligonucleotide
  source 1..25: mol_type = other DNA
gaggagtgcgaatccacactccgaa

SEQ ID NO: 378 - DNA, 25 bp, synthetic construct
  misc_feature 1..25: note = Description of Artificial Sequence: Synthetic oligonucleotide
  source 1..25: mol_type = other DNA
taacggtttctcttccaaaagtgag

SEQ ID NO: 379 - DNA, 25 bp, synthetic construct
  misc_feature 1..25: note = Description of Artificial Sequence: Synthetic oligonucleotide
  source 1..25: mol_type = other DNA
ttctcttccaaaagtgagacaagaa

SEQ ID NO: 380 - DNA, 25 bp, synthetic construct
  misc_feature 1..25: note = Description of Artificial Sequence: Synthetic oligonucleotide
  source 1..25: mol_type = other DNA
ccaaaagtgagacaagaaatgtgaa

SEQ ID NO: 381 - DNA, 25 bp, synthetic construct
  misc_feature 1..25: note = Description of Artificial Sequence: Synthetic oligonucleotide
  source 1..25: mol_type = other DNA
gacaagaaatgtgaaaccacaagag

SEQ ID NO: 382 - DNA, 25 bp, synthetic construct
  misc_feature 1..25: note = Description of Artificial Sequence: Synthetic oligonucleotide
  source 1..25: mol_type = other DNA
tgtgaaaccacaagagttgcctgaa

SEQ ID NO: 383 - DNA, 25 bp, synthetic construct
  misc_feature 1..25: note = Description of Artificial Sequence: Synthetic oligonucleotide
  source 1..25: mol_type = other DNA
gactactaggtctctagatgctgga

SEQ ID NO: 384 - DNA, 25 bp, synthetic construct
  misc_feature 1..25: note = Description of Artificial Sequence: Synthetic oligonucleotide
  source 1..25: mol_type = other DNA
ttaacacccacccaggtagctagag

SEQ ID NO: 385 - DNA, 25 bp, synthetic construct
  misc_feature 1..25: note = Description of Artificial Sequence: Synthetic oligonucleotide
  source 1..25: mol_type = other DNA
gtcattagttccccccagcaaagaa

SEQ ID NO: 386 - DNA, 25 bp, synthetic construct
  misc_feature 1..25: note = Description of Artificial Sequence: Synthetic oligonucleotide
  source 1..25: mol_type = other DNA
cccagcaaagaattgcttgcctgag

SEQ ID NO: 387 - DNA, 25 bp, synthetic construct
  misc_feature 1..25: note = Description of Artificial Sequence: Synthetic oligonucleotide
  source 1..25: mol_type = other DNA
gcttgcctgagtgcagtatggtgag

SEQ ID NO: 388 - DNA, 25 bp, synthetic construct
  misc_feature 1..25: note = Description of Artificial Sequence: Synthetic oligonucleotide
  source 1..25: mol_type = other DNA
cctgagtgcagtatggtgaggtgaa

SEQ ID NO: 389 - DNA, 25 bp, synthetic construct
  misc_feature 1..25: note = Description of Artificial Sequence: Synthetic oligonucleotide
  source 1..25: mol_type = other DNA
atggtgaggtgaacaatgctcagga

SEQ ID NO: 390 - DNA, 25 bp, synthetic construct
  misc_feature 1..25: note = Description of Artificial Sequence: Synthetic oligonucleotide
  source 1..25: mol_type = other DNA
tggtgaggtgaacaatgctcaggag

SEQ ID NO: 391 - DNA, 25 bp, synthetic construct
  misc_feature 1..25: note = Description of Artificial Sequence: Synthetic oligonucleotide
  source 1..25: mol_type = other DNA
gactctaaggcttcccgatacagag

SEQ ID NO: 392 - DNA, 25 bp, synthetic construct
  misc_feature 1..25: note = Description of Artificial Sequence: Synthetic oligonucleotide
  source 1..25: mol_type = other DNA
taaggcttcccgatacagagctgag

SEQ ID NO: 393 - DNA, 25 bp, synthetic construct
  misc_feature 1..25: note = Description of Artificial Sequence: Synthetic oligonucleotide
  source 1..25: mol_type = other DNA
tacagagctgaggcggtatctagaa

SEQ ID NO: 394 - DNA, 25 bp, synthetic construct
  misc_feature 1..25: note = Description of Artificial Sequence: Synthetic oligonucleotide
  source 1..25: mol_type = other DNA
ggtatctagaagatctcgtactgaa

SEQ ID NO: 395 - DNA, 25 bp, synthetic construct
  misc_feature 1..25: note = Description of Artificial Sequence: Synthetic oligonucleotide
  source 1..25: mol_type = other DNA
atctagaagatctcgtactgaagga

SEQ ID NO: 396 - DNA, 25 bp, synthetic construct
  misc_feature 1..25: note = Description of Artificial Sequence: Synthetic oligonucleotide
  source 1..25: mol_type = other DNA
tctagaagatctcgtactgaaggaa

SEQ ID NO: 397 - DNA, 25 bp, synthetic construct
  misc_feature 1..25: note = Description of Artificial Sequence: Synthetic oligonucleotide
  source 1..25: mol_type = other DNA
gaagatctcgtactgaaggaaagaa

SEQ ID NO: 398 - DNA, 25 bp, synthetic construct
  misc_feature 1..25: note = Description of Artificial Sequence: Synthetic oligonucleotide
  source 1..25: mol_type = other DNA
tcgtactgaaggaaagaagtcagaa

SEQ ID NO: 399 - DNA, 25 bp, synthetic construct
  misc_feature 1..25: note = Description of Artificial Sequence: Synthetic oligonucleotide
  source 1..25: mol_type = other DNA
aaagaagtcagaaggcaaaaacgag

SEQ ID NO: 400 - DNA, 25 bp, synthetic construct
  misc_feature 1..25: note = Description of Artificial Sequence: Synthetic oligonucleotide
  source 1..25: mol_type = other DNA
agaagtcagaaggcaaaaacgagag

SEQ ID NO: 401 - DNA, 25 bp, synthetic construct
  misc_feature 1..25: note = Description of Artificial Sequence: Synthetic oligonucleotide
  source 1..25: mol_type = other DNA
agtagctccaaattctttataaggg

SEQ ID NO: 402 - DNA, 25 bp, synthetic construct
  misc_feature 1..25: note = Description of Artificial Sequence: Synthetic oligonucleotide
  source 1..25: mol_type = other DNA
aaagccacccaaggcacagcttgga

SEQ ID NO: 403 - DNA, 25 bp, synthetic construct
  misc_feature 1..25: note = Description of Artificial Sequence: Synthetic oligonucleotide
  source 1..25: mol_type = other DNA
aagccacccaaggcacagcttggag

SEQ ID NO: 404 - DNA, 25 bp, synthetic construct
  misc_feature 1..25: note = Description of Artificial Sequence: Synthetic oligonucleotide
  source 1..25: mol_type = other DNA
ccaaggcacagcttggaggcttgaa

SEQ ID NO: 405 - DNA, 25 bp, synthetic construct
  misc_feature 1..25: note = Description of Artificial Sequence: Synthetic oligonucleotide
  source 1..25: mol_type = other DNA
cagcttggaggcttgaacagtagga

SEQ ID NO: 406 - DNA, 25 bp, synthetic construct
  misc_feature 1..25: note = Description of Artificial Sequence: Synthetic oligonucleotide
  source 1..25: mol_type = other DNA
ggaggcttgaacagtaggacatgaa

SEQ ID NO: 407 - DNA, 25 bp, synthetic construct
  misc_feature 1..25: note = Description of Artificial Sequence: Synthetic oligonucleotide
  source 1..25: mol_type = other DNA
ttgaacagtaggacatgaacaagag

SEQ ID NO: 408 - DNA, 25 bp, synthetic construct
  misc_feature 1..25: note = Description of Artificial Sequence: Synthetic oligonucleotide
  source 1..25: mol_type = other DNA
atgaacaagagatgattaggcagag

SEQ ID NO: 409 - DNA, 25 bp, synthetic construct
  misc_feature 1..25: note = Description of Artificial Sequence: Synthetic oligonucleotide
  source 1..25: mol_type = other DNA
caagagatgattaggcagaggtgaa

SEQ ID NO: 410 - DNA, 25 bp, synthetic construct
  misc_feature 1..25: note = Description of Artificial Sequence: Synthetic oligonucleotide
  source 1..25: mol_type = other DNA
agtctttaaacaaacagtctttgaa

SEQ ID NO: 411 - DNA, 25 bp, synthetic construct
  misc_feature 1..25: note = Description of Artificial Sequence: Synthetic oligonucleotide
  source 1..25: mol_type = other DNA
aaggtcggtcgttgacattgcagag

SEQ ID NO: 412 - DNA, 25 bp, synthetic construct
  misc_feature 1..25: note = Description of Artificial Sequence: Synthetic oligonucleotide
  source 1..25: mol_type = other DNA
ggtcggtcgttgacattgcagagag

SEQ ID NO: 413 - DNA, 25 bp, synthetic construct
  misc_feature 1..25: note = Description of Artificial Sequence: Synthetic oligonucleotide
  source 1..25: mol_type = other DNA
gttgacattgcagagagtccaagag

SEQ ID NO: 414 - DNA, 25 bp, synthetic construct
  misc_feature 1..25: note = Description of Artificial Sequence: Synthetic oligonucleotide
  source 1..25: mol_type = other DNA
gagtcctcttatgtaagaccttggg

SEQ ID NO: 415 - DNA, 25 bp, synthetic construct
  misc_feature 1..25: note = Description of Artificial Sequence: Synthetic oligonucleotide
  source 1..25: mol_type = other DNA
aagaccttgggcaacattcggtggg

SEQ ID NO: 416 - DNA, 25 bp, synthetic construct
  misc_feature 1..25: note = Description of Artificial Sequence: Synthetic oligonucleotide
  source 1..25: mol_type = other DNA
ggtggtctccatgcgacgtgcagag

SEQ ID NO: 417 - DNA, 25 bp, synthetic construct
  misc_feature 1..25: note = Description of Artificial Sequence: Synthetic oligonucleotide
  source 1..25: mol_type = other DNA
tctccatgcgacgtgcagaggtgaa

SEQ ID NO: 418 - DNA, 25 bp, synthetic construct
  misc_feature 1..25: note = Description of Artificial Sequence: Synthetic oligonucleotide
  source 1..25: mol_type = other DNA
atgcgacgtgcagaggtgaagcgaa

SEQ ID NO: 419 - DNA, 25 bp, synthetic construct
  misc_feature 1..25: note = Description of Artificial Sequence: Synthetic oligonucleotide
  source 1..25: mol_type = other DNA
aagtgcacacggtccggcagatgag

SEQ ID NO: 420 - DNA, 25 bp, synthetic construct
  misc_feature 1..25: note = Description of Artificial Sequence: Synthetic oligonucleotide
  source 1..25: mol_type = other DNA
gtgcacacggtccggcagatgagaa

SEQ ID NO: 421 - DNA, 25 bp, synthetic construct
  misc_feature 1..25: note = Description of Artificial Sequence: Synthetic oligonucleotide
  source 1..25: mol_type = other DNA
cggcagatgagaaggcacagacggg

SEQ ID NO: 422 - DNA, 25 bp, synthetic construct
  misc_feature 1..25: note = Description of Artificial Sequence: Synthetic oligonucleotide
  source 1..25: mol_type = other DNA
ggcagatgagaaggcacagacgggg

SEQ ID NO: 423 - DNA, 25 bp, synthetic construct
  misc_feature 1..25: note = Description of Artificial Sequence: Synthetic oligonucleotide
  source 1..25: mol_type = other DNA
gcagatgagaaggcacagacgggga

SEQ ID NO: 424 - DNA, 25 bp, synthetic construct
  misc_feature 1..25: note = Description of Artificial Sequence: Synthetic oligonucleotide
  source 1..25: mol_type = other DNA
cagatgagaaggcacagacggggag

SEQ ID NO: 425 - DNA, 25 bp, synthetic construct
  misc_feature 1..25: note = Description of Artificial Sequence: Synthetic oligonucleotide
  source 1..25: mol_type = other DNA
acagacggggagtccgcgtaaagag

SEQ ID NO: 426 - DNA, 25 bp, synthetic construct
  misc_feature 1..25: note = Description of Artificial Sequence: Synthetic oligonucleotide
  source 1..25: mol_type = other DNA
agacggggagtccgcgtaaagagag

SEQ ID NO: 427 - DNA, 25 bp, synthetic construct
  misc_feature 1..25: note = Description of Artificial Sequence: Synthetic oligonucleotide
  source 1..25: mol_type = other DNA
gaggtgcgccccgtggtcggtcgga

SEQ ID NO: 428 - DNA, 25 bp, synthetic construct
  misc_feature 1..25: note = Description of Artificial Sequence: Synthetic oligonucleotide
  source 1..25: mol_type = other DNA
aggtgcgccccgtggtcggtcggaa

SEQ ID NO: 429 - DNA, 25 bp, synthetic construct
  misc_feature 1..25: note = Description of Artificial Sequence: Synthetic oligonucleotide
  source 1..25: mol_type = other DNA
gtggtcggtcggaacggcagacgga

SEQ ID NO: 430 - DNA, 25 bp, synthetic construct
  misc_feature 1..25: note = Description of Artificial Sequence: Synthetic oligonucleotide
  source 1..25: mol_type = other DNA
tggtcggtcggaacggcagacggag

SEQ ID NO: 431 - DNA, 25 bp, synthetic construct
  misc_feature 1..25: note = Description of Artificial Sequence: Synthetic oligonucleotide
  source 1..25: mol_type = other DNA
gtcggtcggaacggcagacggagaa

SEQ ID NO: 432 - DNA, 25 bp, synthetic construct
  misc_feature 1..25: note = Description of Artificial Sequence: Synthetic oligonucleotide
  source 1..25: mol_type = other DNA
ggtcggaacggcagacggagaaggg

SEQ ID NO: 433 - DNA, 25 bp, synthetic construct
  misc_feature 1..25: note = Description of Artificial Sequence: Synthetic oligonucleotide
  source 1..25: mol_type = other DNA
gtcggaacggcagacggagaagggg

SEQ ID NO: 434 - DNA, 25 bp, synthetic construct
  misc_feature 1..25: note = Description of Artificial Sequence: Synthetic oligonucleotide
  source 1..25: mol_type = other DNA
tcggaacggcagacggagaagggga

SEQ ID NO: 435 - DNA, 25 bp, synthetic construct
  misc_feature 1..25: note = Description of Artificial Sequence: Synthetic oligonucleotide
  source 1..25: mol_type = other DNA
aacggcagacggagaaggggacgag

SEQ ID NO: 436 - DNA, 25 bp, synthetic construct
  misc_feature 1..25: note = Description of Artificial Sequence: Synthetic oligonucleotide
  source 1..25: mol_type = other DNA
cggcagacggagaaggggacgagag

SEQ ID NO: 437 - DNA, 25 bp, synthetic construct
  misc_feature 1..25: note = Description of Artificial Sequence: Synthetic oligonucleotide
  source 1..25: mol_type = other DNA
gcagacggagaaggggacgagagag

SEQ ID NO: 438 - DNA, 25 bp, synthetic construct
  misc_feature 1..25: note = Description of Artificial Sequence: Synthetic oligonucleotide
  source 1..25: mol_type = other DNA
cgagagagtcccaagcgaccccgag

SEQ ID NO: 439 - DNA, 25 bp, synthetic construct
  misc_feature 1..25: note = Description of Artificial Sequence: Synthetic oligonucleotide
  source 1..25: mol_type = other DNA
agagagtcccaagcgaccccgagaa

SEQ ID NO: 440 - DNA, 25 bp, synthetic construct
  misc_feature 1..25: note = Description of Artificial Sequence: Synthetic oligonucleotide
  source 1..25: mol_type = other DNA
gagtcccaagcgaccccgagaaggg

SEQ ID NO: 441 - DNA, 25 bp, synthetic construct
  misc_feature 1..25: note = Description of Artificial Sequence: Synthetic oligonucleotide
  source 1..25: mol_type = other DNA
accccgagaagggtcgtccgcagga

SEQ ID NO: 442 - DNA, 25 bp, synthetic construct
  misc_feature 1..25: note = Description of Artificial Sequence: Synthetic oligonucleotide
  source 1..25: mol_type = other DNA
gtccgcaggattcagcgccgacggg

SEQ ID NO: 443 - DNA, 25 bp, synthetic construct
  misc_feature 1..25: note = Description of Artificial Sequence: Synthetic oligonucleotide
  source 1..25: mol_type = other DNA
tccgcaggattcagcgccgacggga

SEQ ID NO: 444 - DNA, 25 bp, synthetic construct
  misc_feature 1..25: note = Description of Artificial Sequence: Synthetic oligonucleotide
  source 1..25: mol_type = other DNA
gcgccgacgggacgtaaacaaagga

SEQ ID NO: 445 - DNA, 25 bp, synthetic construct
  misc_feature 1..25: note = Description of Artificial Sequence: Synthetic oligonucleotide
  source 1..25: mol_type = other DNA
taaacaaaggacgtcccgcgcagga

SEQ ID NO: 446 - DNA, 25 bp, synthetic construct
  misc_feature 1..25: note = Description of Artificial Sequence: Synthetic oligonucleotide
  source 1..25: mol_type = other DNA
ggcagcacagcctagcagccatgga

SEQ ID NO: 447 - DNA, 25 bp, synthetic construct
  misc_feature 1..25: note = Description of Artificial Sequence: Synthetic oligonucleotide
  source 1..25: mol_type = other DNA
catggatacgatgtatatttgcggg

SEQ ID NO: 448 - DNA, 25 bp, synthetic construct
  misc_feature 1..25: note = Description of Artificial Sequence: Synthetic oligonucleotide
  source 1..25: mol_type = other DNA
atggatacgatgtatatttgcggga

SEQ ID NO: 449 - DNA, 25 bp, synthetic construct
  misc_feature 1..25: note = Description of Artificial Sequence: Synthetic oligonucleotide
  source 1..25: mol_type = other DNA
tggatacgatgtatatttgcgggag

SEQ ID NO: 450 - DNA, 25 bp, synthetic construct
  misc_feature 1..25: note = Description of Artificial Sequence: Synthetic oligonucleotide
  source 1..25: mol_type = other DNA
gatacgatgtatatttgcgggagag

SEQ ID NO: 451 - DNA, 25 bp, synthetic construct
  misc_feature 1..25: note = Description of Artificial Sequence: Synthetic oligonucleotide
  source 1..25: mol_type = other DNA
tacgatgtatatttgcgggagagga

SEQ ID NO: 452 - DNA, 25 bp, synthetic construct
  misc_feature 1..25: note = Description of Artificial Sequence: Synthetic oligonucleotide
  source 1..25: mol_type = other DNA
atatttgcgggagaggacaacagag

SEQ ID NO: 453 - DNA, 25 bp, synthetic construct
  misc_feature 1..25: note = Description of Artificial Sequence: Synthetic oligonucleotide
  source 1..25: mol_type = other DNA
atgtttgctccagacctgctgcgag

SEQ ID NO: 454 - DNA, 25 bp, synthetic construct
  misc_feature 1..25: note = Description of Artificial Sequence: Synthetic oligonucleotide
  source 1..25: mol_type = other DNA
ctgcgagcaaaacaagcggctagga

SEQ ID NO: 455 - DNA, 25 bp, synthetic construct
  misc_feature 1..25: note = Description of Artificial Sequence: Synthetic oligonucleotide
  source 1..25: mol_type = other DNA
tgcgagcaaaacaagcggctaggag

SEQ ID NO: 456 - DNA, 25 bp, synthetic construct
  misc_feature 1..25: note = Description of Artificial Sequence: Synthetic oligonucleotide
  source 1..25: mol_type = other DNA
gcggctaggagttccgcagtatgga

SEQ ID NO: 457 - DNA, 25 bp, synthetic construct
  misc_feature 1..25: note = Description of Artificial Sequence: Synthetic oligonucleotide
  source 1..25: mol_type = other DNA
agttccgcagtatggatcggcagag

SEQ ID NO: 458 - DNA, 25 bp, synthetic construct
  misc_feature 1..25: note = Description of Artificial Sequence: Synthetic oligonucleotide
  source 1..25: mol_type = other DNA
ttccgcagtatggatcggcagagga

SEQ ID NO: 459 - DNA, 25 bp, synthetic construct
  misc_feature 1..25: note = Description of Artificial Sequence: Synthetic oligonucleotide
  source 1..25: mol_type = other DNA
tccgcagtatggatcggcagaggag

SEQ ID NO: 460 - DNA, 25 bp, synthetic construct
  misc_feature 1..25: note = Description of Artificial Sequence: Synthetic oligonucleotide
  source 1..25: mol_type = other DNA
agtatggatcggcagaggagccgaa

SEQ ID NO: 461 - DNA, 25 bp, synthetic construct
  misc_feature 1..25: note = Description of Artificial Sequence: Synthetic oligonucleotide
  source 1..25: mol_type = other DNA
ccatgaccaagccccagccagtggg

SEQ ID NO: 462 - DNA, 25 bp, synthetic construct
  misc_feature 1..25: note = Description of Artificial Sequence: Synthetic oligonucleotide
  source 1..25: mol_type = other DNA
catgaccaagccccagccagtgggg

SEQ ID NO: 463 - DNA, 25 bp, synthetic construct
  misc_feature 1..25: note = Description of Artificial Sequence: Synthetic oligonucleotide
  source 1..25: mol_type = other DNA
atgaccaagccccagccagtggggg

SEQ ID NO: 464 - DNA, 25 bp, synthetic construct
  misc_feature 1..25: note = Description of Artificial Sequence: Synthetic oligonucleotide
  source 1..25: mol_type = other DNA
tggcacagacctggccgttgccggg

SEQ ID NO: 465 - DNA, 25 bp, synthetic construct
  misc_feature 1..25: note = Description of Artificial Sequence: Synthetic oligonucleotide
  source 1..25: mol_type = other DNA
gacctggccgttgccgggcaacggg

SEQ ID NO: 466 - DNA, 25 bp, synthetic construct
  misc_feature 1..25: note = Description of Artificial Sequence: Synthetic oligonucleotide
  source 1..25: mol_type = other DNA
acctggccgttgccgggcaacgggg

SEQ ID NO: 467 - DNA, 25 bp, synthetic construct
  misc_feature 1..25: note = Description of Artificial Sequence: Synthetic oligonucleotide
  source 1..25: mol_type = other DNA
aggttcaggtattgtttacacagaa

SEQ ID NO: 468 - DNA, 25 bp, synthetic construct
  misc_feature 1..25: note = Description of Artificial Sequence: Synthetic oligonucleotide
  source 1..25: mol_type = other DNA
cagaaaggccttgtaagttggcgag

SEQ ID NO: 469 - DNA, 25 bp, synthetic construct
  misc_feature 1..25: note = Description of Artificial Sequence: Synthetic oligonucleotide
  source 1..25: mol_type = other DNA
gaaaggccttgtaagttggcgagaa

SEQ ID NO: 470 - DNA, 25 bp, synthetic construct
  misc_feature 1..25: note = Description of Artificial Sequence: Synthetic oligonucleotide
  source 1..25: mol_type = other DNA
ccttgtaagttggcgagaaagtgaa

SEQ ID NO: 471 - DNA, 25 bp, synthetic construct
  misc_feature 1..25: note = Description of Artificial Sequence: Synthetic oligonucleotide
  source 1..25: mol_type = other DNA
aaagtgaaagcctgcttagattgaa

SEQ ID NO: 472 - DNA, 25 bp, synthetic construct
  misc_feature 1..25: note = Description of Artificial Sequence: Synthetic oligonucleotide
  source 1..25: mol_type = other DNA
tagattgaatacatgcatacaaggg

SEQ ID NO: 473 - DNA, 25 bp, synthetic construct
  misc_feature 1..25: note = Description of Artificial Sequence: Synthetic oligonucleotide
  source 1..25: mol_type = other DNA
tgcatacaagggcattaacgcagga

SEQ ID NO: 474 - DNA, 25 bp, synthetic construct
  misc_feature 1..25: note = Description of Artificial Sequence: Synthetic oligonucleotide
  source 1..25: mol_type = other DNA
aggataaccacattgtgtaaatggg

SEQ ID NO: 475 - DNA, 25 bp, synthetic construct
  misc_feature 1..25: note = Description of Artificial Sequence: Synthetic oligonucleotide
  source 1..25: mol_type = other DNA
ggataaccacattgtgtaaatgggg

SEQ ID NO: 476 - DNA, 25 bp, synthetic construct
  misc_feature 1..25: note = Description of Artificial Sequence: Synthetic oligonucleotide
  source 1..25: mol_type = other DNA
ccaatcaataggcctgttaatagga

SEQ ID NO: 477 - DNA, 25 bp, synthetic construct
  misc_feature 1..25: note = Description of Artificial Sequence: Synthetic oligonucleotide
  source 1..25: mol_type = other DNA
caatcaataggcctgttaataggaa

SEQ ID NO: 478 - DNA, 25 bp, synthetic construct
  misc_feature 1..25: note = Description of Artificial Sequence: Synthetic oligonucleotide
  source 1..25: mol_type = other DNA
gtatgatgtgttcttgtggcaagga

SEQ ID NO: 479 - DNA, 25 bp, synthetic construct
  misc_feature 1..25: note = Description of Artificial Sequence: Synthetic oligonucleotide
  source 1..25: mol_type = other DNA
atgacataacccataaaattcagag

SEQ ID NO: 480 - DNA, 25 bp, synthetic construct
  misc_feature 1..25: note = Description of Artificial Sequence: Synthetic oligonucleotide
  source 1..25: mol_type = other DNA
gacataacccataaaattcagagag

SEQ ID NO: 481 - DNA, 25 bp, synthetic construct
  misc_feature 1..25: note = Description of Artificial Sequence: Synthetic oligonucleotide
  source 1..25: mol_type = other DNA
accccatctctttgttttgttaggg

SEQ ID NO: 482 - DNA, 25 bp, synthetic construct
  misc_feature 1..25: note = Description of Artificial Sequence: Synthetic oligonucleotide
  source 1..25: mol_type = other DNA
aaatgtatacccaaagacaaaagaa

SEQ ID NO: 483 - DNA, 25 bp, synthetic construct
  misc_feature 1..25: note = Description of Artificial Sequence: Synthetic oligonucleotide
  source 1..25: mol_type = other DNA
aaattggtaacagcggtaaaaaggg

SEQ ID NO: 484 - DNA, 25 bp, synthetic construct
  misc_feature 1..25: note = Description of Artificial Sequence: Synthetic oligonucleotide
  source 1..25: mol_type = other DNA
aattggtaacagcggtaaaaaggga

SEQ ID NO: 485 - DNA, 25 bp, synthetic construct
  misc_feature 1..25: note = Description of Artificial Sequence: Synthetic oligonucleotide
  source 1..25: mol_type = other DNA
ataccacatcatccatataactgaa

SEQ ID NO: 486 - DNA, 25 bp, synthetic construct
  misc_feature 1..25: note = Description of Artificial Sequence: Synthetic oligonucleotide
  source 1..25: mol_type = other DNA
atataactgaaagccaaacagtggg

SEQ ID NO: 487 - DNA, 25 bp, synthetic construct
  misc_feature 1..25: note = Description of Artificial Sequence: Synthetic oligonucleotide
  source 1..25: mol_type = other DNA
tataactgaaagccaaacagtgggg

SEQ ID NO: 488 - DNA, 25 bp, synthetic construct
  misc_feature 1..25: note = Description of Artificial Sequence: Synthetic oligonucleotide
  source 1..25: mol_type = other DNA
ataactgaaagccaaacagtggggg

SEQ ID NO: 489 - DNA, 25 bp, synthetic construct
  misc_feature 1..25: note = Description of Artificial Sequence: Synthetic oligonucleotide
  source 1..25: mol_type = other DNA
taactgaaagccaaacagtggggga

SEQ ID NO: 490 - DNA, 25 bp, synthetic construct
  misc_feature 1..25: note = Description of Artificial Sequence: Synthetic oligonucleotide
  source 1..25: mol_type = other DNA
aactgaaagccaaacagtgggggaa

SEQ ID NO: 491 - DNA, 25 bp, synthetic construct
  misc_feature 1..25: note = Description of Artificial Sequence: Synthetic oligonucleotide
  source 1..25: mol_type = other DNA
aaacagtgggggaaagccctacgaa

SEQ ID NO: 492 - DNA, 25 bp, synthetic construct
  misc_feature 1..25: note = Description of Artificial Sequence: Synthetic oligonucleotide
  source 1..25: mol_type = other DNA
ggggaaagccctacgaaccactgaa

SEQ ID NO: 493 - DNA, 25 bp, synthetic construct
  misc_feature 1..25: note = Description of Artificial Sequence: Synthetic oligonucleotide
  source 1..25: mol_type = other DNA
gaacaaatggcactagtaaactgag

SEQ ID NO: 494 - DNA, 25 bp, synthetic construct
  misc_feature 1..25: note = Description of Artificial Sequence: Synthetic oligonucleotide
  source 1..25: mol_type = other DNA
atggcactagtaaactgagccagga

SEQ ID NO: 495 - DNA, 25 bp, synthetic construct
  misc_feature 1..25: note = Description of Artificial Sequence: Synthetic oligonucleotide
  source 1..25: mol_type = other DNA
tggcactagtaaactgagccaggag

SEQ ID NO: 496 - DNA, 25 bp, synthetic construct
  misc_feature 1..25: note = Description of Artificial Sequence: Synthetic oligonucleotide
  source 1..25: mol_type = other DNA
gcactagtaaactgagccaggagaa

SEQ ID NO: 497 - DNA, 25 bp, synthetic construct
  misc_feature 1..25: note = Description of Artificial Sequence: Synthetic oligonucleotide
  source 1..25: mol_type = other DNA
agtaaactgagccaggagaaacggg

SEQ ID NO: 498 - DNA, 25 bp, synthetic construct
  misc_feature 1..25: note = Description of Artificial Sequence: Synthetic oligonucleotide
  source 1..25: mol_type = other DNA
actgagccaggagaaacgggctgag

SEQ ID NO: 499 - DNA, 25 bp, synthetic construct
  misc_feature 1..25: note = Description of Artificial Sequence: Synthetic oligonucleotide
  source 1..25: mol_type = other DNA
cgggctgaggcccactcccatagga

SEQ ID NO: 500 - DNA, 25 bp, synthetic construct
  misc_feature 1..25: note = Description of Artificial Sequence: Synthetic oligonucleotide
  source 1..25: mol_type = other DNA
gggctgaggcccactcccataggaa

SEQ ID NO: 501 - DNA, 25 bp, synthetic construct
  misc_feature 1..25: note = Description of Artificial Sequence: Synthetic oligonucleotide
  source 1..25: mol_type = other DNA
cccactcccataggaattttccgaa

SEQ ID NO: 502 - DNA, 25 bp, synthetic construct
  misc_feature 1..25: note = Description of Artificial Sequence: Synthetic oligonucleotide
  source 1..25: mol_type = other DNA
ataggaattttccgaaagcccagga

SEQ ID NO: 503 - DNA, 25 bp, synthetic construct
  misc_feature 1..25: note = Description of Artificial Sequence: Synthetic oligonucleotide
  source 1..25: mol_type = other DNA
ttttccgaaagcccaggatgatggg

SEQ ID NO: 504 - DNA, 25 bp, synthetic construct
  misc_feature 1..25: note = Description of Artificial Sequence: Synthetic oligonucleotide
  source 1..25: mol_type = other DNA
tttccgaaagcccaggatgatggga

SEQ ID NO: 505 - DNA, 25 bp, synthetic construct
  misc_feature 1..25: note = Description of Artificial Sequence: Synthetic oligonucleotide
  source 1..25: mol_type = other DNA
cgaaagcccaggatgatgggatggg

SEQ ID NO: 506 - DNA, 25 bp, synthetic construct
  misc_feature 1..25: note = Description of Artificial Sequence: Synthetic oligonucleotide
  source 1..25: mol_type = other DNA
gaaagcccaggatgatgggatggga

SEQ ID NO: 507 - DNA, 25 bp, synthetic construct
  misc_feature 1..25: note = Description of Artificial Sequence: Synthetic oligonucleotide
  source 1..25: mol_type = other DNA
aaagcccaggatgatgggatgggaa

SEQ ID NO: 508 - DNA, 25 bp, synthetic construct
  misc_feature 1..25: note = Description of Artificial Sequence: Synthetic oligonucleotide
  source 1..25: mol_type = other DNA
aatacaggtgcaatttccgtccgaa

SEQ ID NO: 509 - DNA, 25 bp, synthetic construct
  misc_feature 1..25: note = Description of Artificial Sequence: Synthetic oligonucleotide
  source 1..25: mol_type = other DNA
ccgaaggtttggtacagcaacagga

SEQ ID NO: 510 - DNA, 25 bp, synthetic construct
  misc_feature 1..25: note = Description of Artificial Sequence: Synthetic oligonucleotide
  source 1..25: mol_type = other DNA
cgaaggtttggtacagcaacaggag

SEQ ID NO: 511 - DNA, 25 bp, synthetic construct
  misc_feature 1..25: note = Description of Artificial Sequence: Synthetic oligonucleotide
  source 1..25: mol_type = other DNA
aaggtttggtacagcaacaggaggg

SEQ ID NO: 512 - DNA, 25 bp, synthetic construct
  misc_feature 1..25: note = Description of Artificial Sequence: Synthetic oligonucleotide
  source 1..25: mol_type = other DNA
aggtttggtacagcaacaggaggga

SEQ ID NO: 513 - DNA, 25 bp, synthetic construct
  misc_feature 1..25: note = Description of Artificial Sequence: Synthetic oligonucleotide
  source 1..25: mol_type = other DNA
acagcaacaggagggatacatagag

SEQ ID NO: 514 - DNA, 25 bp, synthetic construct
  misc_feature 1..25: note = Description of Artificial Sequence: Synthetic oligonucleotide
  source 1..25: mol_type = other DNA
gagggatacatagaggttccttgag

SEQ ID NO: 515 - DNA, 25 bp, synthetic construct
  misc_feature 1..25: note = Description of Artificial Sequence: Synthetic oligonucleotide
  source 1..25: mol_type = other DNA
gcatggtcccgtgctggtggttgag

SEQ ID NO: 516 - DNA, 25 bp, synthetic construct
  misc_feature 1..25: note = Description of Artificial Sequence: Synthetic oligonucleotide
  source 1..25: mol_type = other DNA
atggtcccgtgctggtggttgagga

SEQ ID NO: 517 - DNA, 25 bp, synthetic construct
  misc_feature 1..25: note = Description of Artificial Sequence: Synthetic oligonucleotide
  source 1..25: mol_type = other DNA
cgtgctggtggttgaggatcctgga

SEQ ID NO: 518 - DNA, 25 bp, synthetic construct
  misc_feature 1..25: note = Description of Artificial Sequence: Synthetic oligonucleotide
  source 1..25: mol_type = other DNA
gtgctggtggttgaggatcctggaa

SEQ ID NO: 519 - DNA, 25 bp, synthetic construct
  misc_feature 1..25: note = Description of Artificial Sequence: Synthetic oligonucleotide
  source 1..25: mol_type = other DNA
gtggttgaggatcctggaattagag

SEQ ID NO: 520 - DNA, 25 bp, synthetic construct
  misc_feature 1..25: note = Description of Artificial Sequence: Synthetic oligonucleotide
  source 1..25: mol_type = other DNA
ggttgaggatcctggaattagagga

SEQ ID NO: 521 - DNA, 25 bp, synthetic construct
  misc_feature 1..25: note = Description of Artificial Sequence: Synthetic oligonucleotide
  source 1..25: mol_type = other DNA
atcctggaattagaggacaaacggg

SEQ ID NO: 522 - DNA, 25 bp, synthetic construct
  misc_feature 1..25: note = Description of Artificial Sequence: Synthetic oligonucleotide
  source 1..25: mol_type = other DNA
ggcaacataccttgatagtccagaa

SEQ ID NO: 523 - DNA, 25 bp, synthetic construct
  misc_feature 1..25: note = Description of Artificial Sequence: Synthetic oligonucleotide
  source 1..25: mol_type = other DNA
aacataccttgatagtccagaagaa

SEQ ID NO: 524 - DNA, 25 bp, synthetic construct
  misc_feature 1..25: note = Description of Artificial Sequence: Synthetic oligonucleotide
  source 1..25: mol_type = other DNA
gatagtccagaagaaccaacaagaa

SEQ ID NO: 525 - DNA, 25 bp, synthetic construct
  misc_feature 1..25: note = Description of Artificial Sequence: Synthetic oligonucleotide
  source 1..25: mol_type = other DNA
ccagaagaaccaacaagaagatgag

SEQ ID NO: 526 - DNA, 25 bp, synthetic construct
  misc_feature 1..25: note = Description of Artificial Sequence: Synthetic oligonucleotide
  source 1..25: mol_type = other DNA
aagaagatgaggcatagcagcagga

SEQ ID NO: 527 - DNA, 25 bp, synthetic construct
  misc_feature 1..25: note = Description of Artificial Sequence: Synthetic oligonucleotide
  source 1..25: mol_type = other DNA
agatgaggcatagcagcaggatgaa

SEQ ID NO: 528 - DNA, 25 bp, synthetic construct
  misc_feature 1..25: note = Description of Artificial Sequence: Synthetic oligonucleotide
  source 1..25: mol_type = other DNA
tgaggcatagcagcaggatgaagag

SEQ ID NO: 529 - DNA, 25 bp, synthetic construct
  misc_feature 1..25: note = Description of Artificial Sequence: Synthetic oligonucleotide
  source 1..25: mol_type = other DNA
aggcatagcagcaggatgaagagga

SEQ ID NO: 530 - DNA, 25 bp, synthetic construct
  misc_feature 1..25: note = Description of Artificial Sequence: Synthetic oligonucleotide
  source 1..25: mol_type = other DNA
ggcatagcagcaggatgaagaggaa

SEQ ID NO: 531 - DNA, 25 bp, synthetic construct
  misc_feature 1..25: note = Description of Artificial Sequence: Synthetic oligonucleotide
  source 1..25: mol_type = other DNA
cagacacatccagcgataaccagga

SEQ ID NO: 532 - DNA, 25 bp, synthetic construct
  misc_feature 1..25: note = Description of Artificial Sequence: Synthetic oligonucleotide
  source 1..25: mol_type = other DNA
ccagcgataaccaggacaagttgga

SEQ ID NO: 533 - DNA, 25 bp, synthetic construct
  misc_feature 1..25: note = Description of Artificial Sequence: Synthetic oligonucleotide
  source 1..25: mol_type = other DNA
cagcgataaccaggacaagttggag

SEQ ID NO: 534 - DNA, 25 bp, synthetic construct
  misc_feature 1..25: note = Description of Artificial Sequence: Synthetic oligonucleotide
  source 1..25: mol_type = other DNA
gcgataaccaggacaagttggagga

SEQ ID NO: 535 - DNA, 25 bp, synthetic construct
  misc_feature 1..25: note = Description of Artificial Sequence: Synthetic oligonucleotide
  source 1..25: mol_type = other DNA
aaccaggacaagttggaggacagga

SEQ ID NO: 536 - DNA, 25 bp, synthetic construct
  misc_feature 1..25: note = Description of Artificial Sequence: Synthetic oligonucleotide
  source 1..25: mol_type = other DNA
accaggacaagttggaggacaggag

SEQ ID NO: 537 - DNA, 25 bp, synthetic construct
  misc_feature 1..25: note = Description of Artificial Sequence: Synthetic oligonucleotide
  source 1..25: mol_type = other DNA
agttggaggacaggaggttggtgag

SEQ ID NO: 538 - DNA, 25 bp, synthetic construct
  misc_feature 1..25: note = Description of Artificial Sequence: Synthetic oligonucleotide
  source 1..25: mol_type = other DNA
gacaggaggttggtgagtgattgga

SEQ ID NO: 539 - DNA, 25 bp, synthetic construct
  misc_feature 1..25: note = Description of Artificial Sequence: Synthetic oligonucleotide
  source 1..25: mol_type = other DNA
acaggaggttggtgagtgattggag

SEQ ID NO: 540 - DNA, 25 bp, synthetic construct
  misc_feature 1..25: note = Description of Artificial Sequence: Synthetic oligonucleotide
  source 1..25: mol_type = other DNA
ggttggtgagtgattggaggttggg

SEQ ID NO: 541 - DNA, 25 bp, synthetic construct
  misc_feature 1..25: note = Description of Artificial Sequence: Synthetic oligonucleotide
  source 1..25: mol_type = other DNA
gttggtgagtgattggaggttgggg

SEQ ID NO: 542 - DNA, 25 bp, synthetic construct
  misc_feature 1..25: note = Description of Artificial Sequence: Synthetic oligonucleotide
  source 1..25: mol_type = other DNA
ttggtgagtgattggaggttgggga

SEQ ID NO: 543 - DNA, 25 bp, synthetic construct
  misc_feature 1..25: note = Description of Artificial Sequence: Synthetic oligonucleotide
  source 1..25: mol_type = other DNA
gtgattggaggttggggactgcgaa

SEQ ID NO: 544 - DNA, 25 bp, synthetic construct
  misc_feature 1..25: note = Description of Artificial Sequence: Synthetic oligonucleotide
  source 1..25: mol_type = other DNA
agacacacggtagttccccctagaa

SEQ ID NO: 545 - DNA, 25 bp, synthetic construct
  misc_feature 1..25: note = Description of Artificial Sequence: Synthetic oligonucleotide
  source 1..25: mol_type = other DNA
cggtagttccccctagaaaattgag

SEQ ID NO: 546 - DNA, 25 bp, synthetic construct
  misc_feature 1..25: note = Description of Artificial Sequence: Synthetic oligonucleotide
  source 1..25: mol_type = other DNA
gtagttccccctagaaaattgagag

SEQ ID NO: 547 - DNA, 25 bp, synthetic construct
  misc_feature 1..25: note = Description of Artificial Sequence: Synthetic oligonucleotide
  source 1..25: mol_type = other DNA
agttccccctagaaaattgagagaa

SEQ ID NO: 548 - DNA, 25 bp, synthetic construct
  misc_feature 1..25: note = Description of Artificial Sequence: Synthetic oligonucleotide
  source 1..25: mol_type = other DNA
aaaattgagagaagtccaccacgag

SEQ ID NO: 549 - DNA, 25 bp, synthetic construct
  misc_feature 1..25: note = Description of Artificial Sequence: Synthetic oligonucleotide
  source 1..25: mol_type = other DNA
agtctagactctgcggtattgtgag

SEQ ID NO: 550 - DNA, 25 bp, synthetic construct
  misc_feature 1..25: note = Description of Artificial Sequence: Synthetic oligonucleotide
  source 1..25: mol_type = other DNA
tctagactctgcggtattgtgagga

SEQ ID NO: 551 - DNA, 25 bp, synthetic construct
  misc_feature 1..25: note = Description of Artificial Sequence: Synthetic oligonucleotide
  source 1..25: mol_type = other DNA
ttgtgaggattcttgtcaacaagaa

SEQ ID NO: 552 - DNA, 25 bp, synthetic construct
  misc_feature 1..25: note = Description of Artificial Sequence: Synthetic oligonucleotide
  source 1..25: mol_type = other DNA
agaaaaaccccgcctgtaacacgag

SEQ ID NO: 553 - DNA, 25 bp, synthetic construct
  misc_feature 1..25: note = Description of Artificial Sequence: Synthetic oligonucleotide
  source 1..25: mol_type = other DNA
aaaaaccccgcctgtaacacgagaa

SEQ ID NO: 554 - DNA, 25 bp, synthetic construct
  misc_feature 1..25: note = Description of Artificial Sequence: Synthetic oligonucleotide
  source 1..25: mol_type = other DNA
aaccccgcctgtaacacgagaaggg

SEQ ID NO: 555 - DNA, 25 bp, synthetic construct
  misc_feature 1..25: note = Description of Artificial Sequence: Synthetic oligonucleotide
  source 1..25: mol_type = other DNA
accccgcctgtaacacgagaagggg

SEQ ID NO: 556 - DNA, 25 bp, synthetic construct
  misc_feature 1..25: note = Description of Artificial Sequence: Synthetic oligonucleotide
  source 1..25: mol_type = other DNA
tgtaacacgagaaggggtcctagga

SEQ ID NO: 557 - DNA, 25 bp, synthetic construct
  misc_feature 1..25: note = Description of Artificial Sequence: Synthetic oligonucleotide
  source 1..25: mol_type = other DNA
gtaacacgagaaggggtcctaggaa

SEQ ID NO: 558 - DNA, 25 bp, synthetic construct
  misc_feature 1..25: note = Description of Artificial Sequence: Synthetic oligonucleotide
  source 1..25: mol_type = other DNA
gatgttctccatgttcagcgcaggg

SEQ ID NO: 559 - DNA, 25 bp, synthetic construct
  misc_feature 1..25: note = Description of Artificial Sequence: Synthetic oligonucleotide
  source 1..25: mol_type = other DNA
cagcgcagggtccccaatcctcgag

SEQ ID NO: 560 - DNA, 25 bp, synthetic construct
  misc_feature 1..25: note = Description of Artificial Sequence: Synthetic oligonucleotide
  source 1..25: mol_type = other DNA
gcgcagggtccccaatcctcgagaa

SEQ ID NO: 561 - DNA, 25 bp, synthetic construct
  misc_feature 1..25: note = Description of Artificial Sequence: Synthetic oligonucleotide
  source 1..25: mol_type = other DNA
tcctcgagaagattgacgataaggg

SEQ ID NO: 562 - DNA, 25 bp, synthetic construct
  misc_feature 1..25: note = Description of Artificial Sequence: Synthetic oligonucleotide
  source 1..25: mol_type = other DNA
cctcgagaagattgacgataaggga

SEQ ID NO: 563 - DNA, 25 bp, synthetic construct
  misc_feature 1..25: note = Description of Artificial Sequence: Synthetic oligonucleotide
  source 1..25: mol_type = other DNA
ctcgagaagattgacgataagggag

SEQ ID NO: 564 - DNA, 25 bp, synthetic construct
  misc_feature 1..25: note = Description of Artificial Sequence: Synthetic oligonucleotide
  source 1..25: mol_type = other DNA
cgagaagattgacgataagggagag

SEQ ID NO: 565 - DNA, 25 bp, synthetic construct
  misc_feature 1..25: note = Description of Artificial Sequence: Synthetic oligonucleotide
  source 1..25: mol_type = other DNA
cgataagggagaggcagtagtcgga

SEQ ID NO: 566 - DNA, 25 bp, synthetic construct
  misc_feature 1..25: note = Description of Artificial Sequence: Synthetic oligonucleotide
  source 1..25: mol_type = other DNA
gataagggagaggcagtagtcggaa

SEQ ID NO: 567 - DNA, 25 bp, synthetic construct
  misc_feature 1..25: note = Description of Artificial Sequence: Synthetic oligonucleotide
  source 1..25: mol_type = other DNA
gggagaggcagtagtcggaacaggg

SEQ ID NO: 568 - DNA, 25 bp, synthetic construct
  misc_feature 1..25: note = Description of Artificial Sequence: Synthetic oligonucleotide
  source 1..25: mol_type = other DNA
cggaacagggtttactgctcctgaa

SEQ ID NO: 569 - DNA, 25 bp, synthetic construct
  misc_feature 1..25: note = Description of Artificial Sequence: Synthetic oligonucleotide
  source 1..25: mol_type = other DNA
cagggtttactgctcctgaactgga

SEQ ID NO: 570 - DNA, 25 bp, synthetic construct
  misc_feature 1..25: note = Description of Artificial Sequence: Synthetic oligonucleotide
  source 1..25: mol_type = other DNA
agggtttactgctcctgaactggag

SEQ ID NO: 571 - DNA, 25 bp, synthetic construct
  misc_feature 1..25: note = Description of Artificial Sequence: Synthetic oligonucleotide
  source 1..25: mol_type = other DNA
tcctgaactggagccaccagcaggg

SEQ ID NO: 572 - DNA, 25 bp, synthetic construct
  misc_feature 1..25: note = Description of Artificial Sequence: Synthetic oligonucleotide
  source 1..25: mol_type = other DNA
cctgaactggagccaccagcaggga

SEQ ID NO: 573 - DNA, 25 bp, synthetic construct
  misc_feature 1..25: note = Description of Artificial Sequence: Synthetic oligonucleotide
  source 1..25: mol_type = other DNA
ctgaactggagccaccagcagggaa

SEQ ID NO: 574 - DNA, 25 bp, synthetic construct
  misc_feature 1..25: note = Description of Artificial Sequence: Synthetic oligonucleotide
  source 1..25: mol_type = other DNA
ggaaatacaggcctctcactctggg

SEQ ID NO: 575 - DNA, 25 bp, synthetic construct
  misc_feature 1..25: note = Description of Artificial Sequence: Synthetic oligonucleotide
  source 1..25: mol_type = other DNA
gaaatacaggcctctcactctggga

SEQ ID NO: 576 - DNA, 23 bp, synthetic construct
  misc_feature 1..23: note = Description of Artificial Sequence: Synthetic oligonucleotide
  source 1..23: mol_type = other DNA
aacctttcaccaaactctgcaag

SEQ ID NO: 577 - DNA, 23 bp, synthetic construct
  misc_feature 1..23: note = Description of Artificial Sequence: Synthetic oligonucleotide
  source 1..23: mol_type = other DNA
caccaaactctgcaagatcccag

SEQ ID NO: 578 - DNA, 23 bp, synthetic construct
  misc_feature 1..23: note = Description of Artificial Sequence: Synthetic oligonucleotide
  source 1..23: mol_type = other DNA
ccaaactctgcaagatcccagag

SEQ ID NO: 579 - DNA, 23 bp, synthetic construct
  misc_feature 1..23: note = Description of Artificial Sequence: Synthetic oligonucleotide
  source 1..23: mol_type = other DNA
actctgcaagatcccagagtgag

SEQ ID NO: 580 - DNA, 23 bp, synthetic construct
  misc_feature 1..23: note = Description of Artificial Sequence: Synthetic oligonucleotide
  source 1..23: mol_type = other DNA
tctgcaagatcccagagtgagag

SEQ ID NO: 581 - DNA, 23 bp, synthetic construct
  misc_feature 1..23: note = Description of Artificial Sequence: Synthetic oligonucleotide
  source 1..23: mol_type = other DNA
ctgcaagatcccagagtgagagg

SEQ ID NO: 582 - DNA, 23 bp, synthetic construct
  misc_feature 1..23: note = Description of Artificial Sequence: Synthetic oligonucleotide
  source 1..23: mol_type = other DNA
agaggcctgtatttccctgctgg

SEQ ID NO: 583 - DNA, 23 bp, synthetic construct
  misc_feature 1..23: note = Description of Artificial Sequence: Synthetic oligonucleotide
  source 1..23: mol_type = other DNA
ggcctgtatttccctgctggtgg

SEQ ID NO: 584 - DNA, 23 bp, synthetic construct
  misc_feature 1..23: note = Description of Artificial Sequence: Synthetic oligonucleotide
  source 1..23: mol_type = other DNA
tatttccctgctggtggctccag

SEQ ID NO: 585 - DNA, 23 bp, synthetic construct
  misc_feature 1..23: note = Description of Artificial Sequence: Synthetic oligonucleotide
  source 1..23: mol_type = other DNA
ccctgctggtggctccagttcag

SEQ ID NO: 586 - DNA, 23 bp, synthetic construct
  misc_feature 1..23: note = Description of Artificial Sequence: Synthetic oligonucleotide
  source 1..23: mol_type = other DNA
cctgctggtggctccagttcagg

SEQ ID NO: 587 - DNA, 23 bp, synthetic construct
  misc_feature 1..23: note = Description of Artificial Sequence: Synthetic oligonucleotide
  source 1..23: mol_type = other DNA
tgctggtggctccagttcaggag

SEQ ID NO: 588 - DNA, 23 bp, synthetic construct
  misc_feature 1..23: note = Description of Artificial Sequence: Synthetic oligonucleotide
  source 1..23: mol_type = other DNA
tggtggctccagttcaggagcag

SEQ ID NO: 589 - DNA, 23 bp, synthetic construct
  misc_feature 1..23: note = Description of Artificial Sequence: Synthetic oligonucleotide
  source 1..23: mol_type = other DNA
cccttatcgtcaatcttctcgag

SEQ ID NO: 590 - DNA, 23 bp, synthetic construct
  misc_feature 1..23: note = Description of Artificial Sequence: Synthetic oligonucleotide
  source 1..23: mol_type = other DNA
ccttatcgtcaatcttctcgagg

SEQ ID NO: 591 - DNA, 23 bp, synthetic construct
  misc_feature 1..23: note = Description of Artificial Sequence: Synthetic oligonucleotide
  source 1..23: mol_type = other DNA
tcgtcaatcttctcgaggattgg

SEQ ID NO: 592 - DNA, 23 bp, synthetic construct
  misc_feature 1..23: note = Description of Artificial Sequence: Synthetic oligonucleotide
  source 1..23: mol_type = other DNA
cgtcaatcttctcgaggattggg

SEQ ID NO: 593 - DNA, 23 bp, synthetic construct
  misc_feature 1..23: note = Description of Artificial Sequence: Synthetic oligonucleotide
  source 1..23: mol_type = other DNA
gtcaatcttctcgaggattgggg

SEQ ID NO: 594 - DNA, 23 bp, synthetic construct
  misc_feature 1..23: note = Description of Artificial Sequence: Synthetic oligonucleotide
  source 1..23: mol_type = other DNA
tggggaccctgcgctgaacatgg

SEQ ID NO: 595 - DNA, 23 bp, synthetic construct
  misc_feature 1..23: note = Description of Artificial Sequence: Synthetic oligonucleotide
  source 1..23: mol_type = other DNA
gggaccctgcgctgaacatggag

SEQ ID NO: 596 - DNA, 23 bp, synthetic construct
  misc_feature 1..23: note = Description of Artificial Sequence: Synthetic oligonucleotide
  source 1..23: mol_type = other DNA
gaacatggagaacatcacatcag

SEQ ID NO: 597 - DNA, 23 bp, synthetic construct
  misc_feature 1..23: note = Description of Artificial Sequence: Synthetic oligonucleotide
  source 1..23: mol_type = other DNA
aacatggagaacatcacatcagg

SEQ ID NO: 598 - DNA, 23 bp, synthetic construct
  misc_feature 1..23: note = Description of Artificial Sequence: Synthetic oligonucleotide
  source 1..23: mol_type = other DNA
gaacatcacatcaggattcctag

SEQ ID NO: 599 - DNA, 23 bp, synthetic construct
  misc_feature 1..23: note = Description of Artificial Sequence: Synthetic oligonucleotide
  source 1..23: mol_type = other DNA
aacatcacatcaggattcctagg

SEQ ID NO: 600 - DNA, 23 bp, synthetic construct
  misc_feature 1..23: note = Description of Artificial Sequence: Synthetic oligonucleotide
  source 1..23: mol_type = other DNA
taggaccccttctcgtgttacag

SEQ ID NO: 601 - DNA, 23 bp, synthetic construct
  misc_feature 1..23: note = Description of Artificial Sequence: Synthetic oligonucleotide
  source 1..23: mol_type = other DNA
aggaccccttctcgtgttacagg

SEQ ID NO: 602 - DNA, 23 bp, synthetic construct
  misc_feature 1..23: note = Description of Artificial Sequence: Synthetic oligonucleotide
  source 1..23: mol_type = other DNA
accccttctcgtgttacaggcgg

SEQ ID NO: 603 - DNA, 23 bp, synthetic construct
  misc_feature 1..23: note = Description of Artificial Sequence: Synthetic oligonucleotide
  source 1..23: mol_type = other DNA
ccccttctcgtgttacaggcggg

SEQ ID NO: 604 - DNA, 23 bp, synthetic construct
  misc_feature 1..23: note = Description of Artificial Sequence: Synthetic oligonucleotide
  source 1..23: mol_type = other DNA
cccttctcgtgttacaggcgggg

SEQ ID NO: 605 - DNA, 23 bp, synthetic construct
  misc_feature 1..23: note = Description of Artificial Sequence: Synthetic oligonucleotide
  source 1..23: mol_type = other DNA
gcggggtttttcttgttgacaag

SEQ ID NO: 606 - DNA, 23 bp, synthetic construct
  misc_feature 1..23: note = Description of Artificial Sequence: Synthetic oligonucleotide
  source 1..23: mol_type = other DNA
caagaatcctcacaataccgcag

SEQ ID NO: 607 - DNA, 23 bp, synthetic construct
  misc_feature 1..23: note = Description of Artificial Sequence: Synthetic oligonucleotide
  source 1..23: mol_type = other DNA
agaatcctcacaataccgcagag

SEQ ID NO: 608 - DNA, 23 bp, synthetic construct
  misc_feature 1..23: note = Description of Artificial Sequence: Synthetic oligonucleotide
  source 1..23: mol_type = other DNA
cctcacaataccgcagagtctag

SEQ ID NO: 609 - DNA, 23 bp, synthetic construct
  misc_feature 1..23: note = Description of Artificial Sequence: Synthetic oligonucleotide
  source 1..23: mol_type = other DNA
taccgcagagtctagactcgtgg

SEQ ID NO: 610 - DNA, 23 bp, synthetic construct
  misc_feature 1..23: note = Description of Artificial Sequence: Synthetic oligonucleotide
  source 1..23: mol_type = other DNA
cgcagagtctagactcgtggtgg

SEQ ID NO: 611 - DNA, 23 bp, synthetic construct
  misc_feature 1..23: note = Description of Artificial Sequence: Synthetic oligonucleotide
  source 1..23: mol_type = other DNA
gtggacttctctcaattttctag

SEQ ID NO: 612 - DNA, 23 bp, synthetic construct
  misc_feature 1..23: note = Description of Artificial Sequence: Synthetic oligonucleotide
  source 1..23: mol_type = other DNA
tggacttctctcaattttctagg

SEQ ID NO: 613 - DNA, 23 bp, synthetic construct
  misc_feature 1..23: note = Description of Artificial Sequence: Synthetic oligonucleotide
  source 1..23: mol_type = other DNA
ggacttctctcaattttctaggg

SEQ ID NO: 614 - DNA, 23 bp, synthetic construct
  misc_feature 1..23: note = Description of Artificial Sequence: Synthetic oligonucleotide
  source 1..23: mol_type = other DNA
gacttctctcaattttctagggg

SEQ ID NO: 615 - DNA, 23 bp, synthetic construct
  misc_feature 1..23: note = Description of Artificial Sequence: Synthetic oligonucleotide
  source 1..23: mol_type = other DNA
acttctctcaattttctaggggg

SEQ ID NO: 616 - DNA, 23 bp, synthetic construct
  misc_feature 1..23: note = Description of Artificial Sequence: Synthetic oligonucleotide
  source 1..23: mol_type = other DNA
gggggaactaccgtgtgtcttgg

SEQ ID NO: 617 - DNA, 23 bp, synthetic construct
  misc_feature 1..23: note = Description of Artificial Sequence: Synthetic oligonucleotide
  source 1..23: mol_type = other DNA
tgtgtcttggccaaaattcgcag

SEQ ID NO: 618 - DNA, 23 bp, synthetic construct
  misc_feature 1..23: note = Description of Artificial Sequence: Synthetic oligonucleotide
  source 1..23: mol_type = other DNA
tcctgtcctccaacttgtcctgg

SEQ ID NO: 619 - DNA, 23 bp, synthetic construct
  misc_feature 1..23: note = Description of Artificial Sequence: Synthetic oligonucleotide
  source 1..23: mol_type = other DNA
caacttgtcctggttatcgctgg

SEQ ID NO: 620 - DNA, 23 bp, synthetic construct
  misc_feature 1..23: note = Description of Artificial Sequence: Synthetic oligonucleotide
  source 1..23: mol_type = other DNA
gttatcgctggatgtgtctgcgg

SEQ ID NO: 621 - DNA, 23 bp, synthetic construct
  misc_feature 1..23: note = Description of Artificial Sequence: Synthetic oligonucleotide
  source 1..23: mol_type = other DNA
gctatgcctcatcttcttgttgg

SEQ ID NO: 622 - DNA, 23 bp, synthetic construct
  misc_feature 1..23: note = Description of Artificial Sequence: Synthetic oligonucleotide
  source 1..23: mol_type = other DNA
catcttcttgttggttcttctgg

SEQ ID NO: 623 - DNA, 23 bp, synthetic construct
  misc_feature 1..23: note = Description of Artificial Sequence: Synthetic oligonucleotide
  source 1..23: mol_type = other DNA
gttggttcttctggactatcaag

SEQ ID NO: 624 - DNA, 23 bp, synthetic construct
  misc_feature 1..23: note = Description of Artificial Sequence: Synthetic oligonucleotide
  source 1..23: mol_type = other DNA
ttggttcttctggactatcaagg

SEQ ID NO: 625 - DNA, 23 bp, synthetic construct
  misc_feature 1..23: note = Description of Artificial Sequence: Synthetic oligonucleotide
  source 1..23: mol_type = other DNA
gcccgtttgtcctctaattccag

SEQ ID NO: 626 - DNA, 23 bp, synthetic construct
  misc_feature 1..23: note = Description of Artificial Sequence: Synthetic oligonucleotide
  source 1..23: mol_type = other DNA
cccgtttgtcctctaattccagg

SEQ ID NO: 627 - DNA, 23 bp, synthetic construct
  misc_feature 1..23: note = Description of Artificial Sequence: Synthetic oligonucleotide
  source 1..23: mol_type = other DNA
attccaggatcctcaaccaccag

SEQ ID NO: 628 - DNA, 23 bp, synthetic construct
  misc_feature 1..23: note = Description of Artificial Sequence: Synthetic oligonucleotide
  source 1..23: mol_type = other DNA
aggatcctcaaccaccagcacgg

SEQ ID NO: 629 - DNA, 23 bp, synthetic construct
  misc_feature 1..23: note = Description of Artificial Sequence: Synthetic oligonucleotide
  source 1..23: mol_type = other DNA
ggatcctcaaccaccagcacggg

SEQ ID NO: 630 - DNA, 23 bp, synthetic construct
  misc_feature 1..23: note = Description of Artificial Sequence: Synthetic oligonucleotide
  source 1..23: mol_type = other DNA
aacctgcatgactactgctcaag

SEQ ID NO: 631 - DNA, 23 bp, synthetic construct
  misc_feature 1..23: note = Description of Artificial Sequence: Synthetic oligonucleotide
  source 1..23: mol_type = other DNA
acctgcatgactactgctcaagg

SEQ ID NO: 632 - DNA, 23 bp, synthetic construct
  misc_feature 1..23: note = Description of Artificial Sequence: Synthetic oligonucleotide
  source 1..23: mol_type = other DNA
ctgttgctgtaccaaaccttcgg

SEQ ID NO: 633 - DNA, 23 bp, synthetic construct
  misc_feature 1..23: note = Description of Artificial Sequence: Synthetic oligonucleotide
  source 1..23: mol_type = other DNA
tgctgtaccaaaccttcggacgg

SEQ ID NO: 634 - DNA, 23 bp, synthetic construct
  misc_feature 1..23: note = Description of Artificial Sequence: Synthetic oligonucleotide
  source 1..23: mol_type = other DNA
gtattcccatcccatcatcctgg

SEQ ID NO: 635 - DNA, 23 bp, synthetic construct
  misc_feature 1..23: note = Description of Artificial Sequence: Synthetic oligonucleotide
  source 1..23: mol_type = other DNA
tattcccatcccatcatcctggg

SEQ ID NO: 636 - DNA, 23 bp, synthetic construct
  misc_feature 1..23: note = Description of Artificial Sequence: Synthetic oligonucleotide
  source 1..23: mol_type = other DNA
atcccatcatcctgggctttcgg

SEQ ID NO: 637 - DNA, 23 bp, synthetic construct
  misc_feature 1..23: note = Description of Artificial Sequence: Synthetic oligonucleotide
  source 1..23: mol_type = other DNA
gggctttcggaaaattcctatgg

SEQ ID NO: 638 - DNA, 23 bp, synthetic construct
  misc_feature 1..23: note = Description of Artificial Sequence: Synthetic oligonucleotide
  source 1..23: mol_type = other DNA
ggctttcggaaaattcctatggg

SEQ ID NO: 639 - DNA, 23 bp, synthetic construct
  misc_feature 1..23: note = Description of Artificial Sequence: Synthetic oligonucleotide
  source 1..23: mol_type = other DNA
ctttcggaaaattcctatgggag

SEQ ID NO: 640 - DNA, 23 bp, synthetic construct
  misc_feature 1..23: note = Description of Artificial Sequence: Synthetic oligonucleotide
  source 1..23: mol_type = other DNA
tcggaaaattcctatgggagtgg

SEQ ID NO: 641 - DNA, 23 bp, synthetic construct
  misc_feature 1..23: note = Description of Artificial Sequence: Synthetic oligonucleotide
  source 1..23: mol_type = other DNA
cggaaaattcctatgggagtggg

SEQ ID NO: 642 - DNA, 23 bp, synthetic construct
  misc_feature 1..23: note = Description of Artificial Sequence: Synthetic oligonucleotide
  source 1..23: mol_type = other DNA
attcctatgggagtgggcctcag

SEQ ID NO: 643 - DNA, 23 bp, synthetic construct
  misc_feature 1..23: note = Description of Artificial Sequence: Synthetic oligonucleotide
  source 1..23: mol_type = other DNA
gggcctcagcccgtttctcctgg

SEQ ID NO: 644 - DNA, 23 bp, synthetic construct
  misc_feature 1..23: note = Description of Artificial Sequence: Synthetic oligonucleotide
  source 1..23: mol_type = other DNA
tcagcccgtttctcctggctcag

SEQ ID NO: 645 - DNA, 23 bp, synthetic construct
  misc_feature 1..23: note = Description of Artificial Sequence: Synthetic oligonucleotide
  source 1..23: mol_type = other DNA
tttctcctggctcagtttactag

SEQ ID NO: 646 - DNA, 23 bp, synthetic construct
  misc_feature 1..23: note = Description of Artificial Sequence: Synthetic oligonucleotide
  source 1..23: mol_type = other DNA
gtttactagtgccatttgttcag

SEQ ID NO: 647 - DNA, 23 bp, synthetic construct
  misc_feature 1..23: note = Description of Artificial Sequence: Synthetic oligonucleotide
  source 1..23: mol_type = other DNA
tactagtgccatttgttcagtgg

SEQ ID NO: 648 - DNA, 23 bp, synthetic construct
  misc_feature 1..23: note = Description of Artificial Sequence: Synthetic oligonucleotide
  source 1..23: mol_type = other DNA
gccatttgttcagtggttcgtag

SEQ ID NO: 649 - DNA, 23 bp, synthetic construct
  misc_feature 1..23: note = Description of Artificial Sequence: Synthetic oligonucleotide
  source 1..23: mol_type = other DNA
ccatttgttcagtggttcgtagg

SEQ ID NO: 650 - DNA, 23 bp, synthetic construct
  misc_feature 1..23: note = Description of Artificial Sequence: Synthetic oligonucleotide
  source 1..23: mol_type = other DNA
catttgttcagtggttcgtaggg

SEQ ID NO: 651 - DNA, 23 bp, synthetic construct
  misc_feature 1..23: note = Description of Artificial Sequence: Synthetic oligonucleotide
  source 1..23: mol_type = other DNA
tagggctttcccccactgtttgg

SEQ ID NO: 652 - DNA, 23 bp, synthetic construct
  misc_feature 1..23: note = Description of Artificial Sequence: Synthetic oligonucleotide
  source 1..23: mol_type = other DNA
ttcccccactgtttggctttcag

SEQ ID NO: 653 - DNA, 23 bp, synthetic construct
  misc_feature 1..23: note = Description of Artificial Sequence: Synthetic oligonucleotide
  source 1..23: mol_type = other DNA
ctgtttggctttcagttatatgg

SEQ ID NO: 654 - DNA, 23 bp, synthetic construct
  misc_feature 1..23: note = Description of Artificial Sequence: Synthetic oligonucleotide
  source 1..23: mol_type = other DNA
tttcagttatatggatgatgtgg

SEQ ID NO: 655 - DNA, 23 bp, synthetic construct
  misc_feature 1..23: note = Description of Artificial Sequence: Synthetic oligonucleotide
  source 1..23: mol_type = other DNA
ttatatggatgatgtggtattgg

SEQ ID NO: 656 - DNA, 23 bp, synthetic construct
  misc_feature 1..23: note = Description of Artificial Sequence: Synthetic oligonucleotide
  source 1..23: mol_type = other DNA
tatatggatgatgtggtattggg

SEQ ID NO: 657 - DNA, 23 bp, synthetic construct
  misc_feature 1..23: note = Description of Artificial Sequence: Synthetic oligonucleotide
  source 1..23: mol_type = other DNA
atatggatgatgtggtattgggg

SEQ ID NO: 658 - DNA, 23 bp, synthetic construct
  misc_feature 1..23: note = Description of Artificial Sequence: Synthetic oligonucleotide
  source 1..23: mol_type = other DNA
tatggatgatgtggtattggggg

SEQ ID NO: 659 - DNA, 23 bp, synthetic construct
  misc_feature 1..23: note = Description of Artificial Sequence: Synthetic oligonucleotide
  source 1..23: mol_type = other DNA
atgatgtggtattgggggccaag

SEQ ID NO: 660 - DNA, 23 bp, synthetic construct
  misc_feature 1..23: note = Description of Artificial Sequence: Synthetic oligonucleotide
  source 1..23: mol_type = other DNA
tattgggggccaagtctgtacag

SEQ ID NO: 661 - DNA, 23 bp, synthetic construct
  misc_feature 1..23: note = Description of Artificial Sequence: Synthetic oligonucleotide
  source 1..23: mol_type = other DNA
ccaagtctgtacagcatcttgag

SEQ ID NO: 662 - DNA, 23 bp, synthetic construct
  misc_feature 1..23: note = Description of Artificial Sequence: Synthetic oligonucleotide
  source 1..23: mol_type = other DNA
taccaattttcttttgtctttgg

SEQ ID NO: 663 - DNA, 23 bp, synthetic construct
  misc_feature 1..23: note = Description of Artificial Sequence: Synthetic oligonucleotide
  source 1..23: mol_type = other DNA
accaattttcttttgtctttggg

SEQ ID NO: 664 - DNA, 23 bp, synthetic construct
  misc_feature 1..23: note = Description of Artificial Sequence: Synthetic oligonucleotide
  source 1..23: mol_type = other DNA
atttaaaccctaacaaaacaaag

SEQ ID NO: 665 - DNA, 23 bp, synthetic construct
  misc_feature 1..23: note = Description of Artificial Sequence: Synthetic oligonucleotide
  source 1..23: mol_type = other DNA
ttaaaccctaacaaaacaaagag

SEQ ID NO: 666 - DNA, 23 bp, synthetic construct
  misc_feature 1..23: note = Description of Artificial Sequence: Synthetic oligonucleotide
  source 1..23: mol_type = other DNA
accctaacaaaacaaagagatgg

SEQ ID NO: 667 - DNA, 23 bp, synthetic construct
  misc_feature 1..23: note = Description of Artificial Sequence: Synthetic oligonucleotide
  source 1..23: mol_type = other DNA
ccctaacaaaacaaagagatggg

SEQ ID NO: 668 - DNA, 23 bp, synthetic construct
  misc_feature 1..23: note = Description of Artificial Sequence: Synthetic oligonucleotide
  source 1..23: mol_type = other DNA
cctaacaaaacaaagagatgggg

SEQ ID NO: 669 - DNA, 23 bp, synthetic construct
  misc_feature 1..23: note = Description of Artificial Sequence: Synthetic oligonucleotide
  source 1..23: mol_type = other DNA
gggttactctctgaattttatgg

SEQ ID NO: 670 - DNA, 23 bp, synthetic construct
  misc_feature 1..23: note = Description of Artificial Sequence: Synthetic oligonucleotide
  source 1..23: mol_type = other DNA
ggttactctctgaattttatggg

SEQ ID NO: 671 - DNA, 23 bp, synthetic construct
  misc_feature 1..23: note = Description of Artificial Sequence: Synthetic oligonucleotide
  source 1..23: mol_type = other DNA
aattttatgggttatgtcattgg

SEQ ID NO: 672 - DNA, 23 bp, synthetic construct
  misc_feature 1..23: note = Description of Artificial Sequence: Synthetic oligonucleotide
  source 1..23: mol_type = other DNA
tttatgggttatgtcattggaag

SEQ ID NO: 673 - DNA, 23 bp, synthetic construct
  misc_feature 1..23: note = Description of Artificial Sequence: Synthetic oligonucleotide
  source 1..23: mol_type = other DNA
ggttatgtcattggaagttatgg

SEQ ID NO: 674 - DNA, 23 bp, synthetic construct
  misc_feature 1..23: note = Description of Artificial Sequence: Synthetic oligonucleotide
  source 1..23: mol_type = other DNA
gttatgtcattggaagttatggg

SEQ ID NO: 675 - DNA, 23 bp, synthetic construct
  misc_feature 1..23: note = Description of Artificial Sequence: Synthetic oligonucleotide
  source 1..23: mol_type = other DNA
aagttatgggtccttgccacaag

SEQ ID NO: 676 - DNA, 23 bp, synthetic construct
  misc_feature 1..23: note = Description of Artificial Sequence: Synthetic oligonucleotide
  source 1..23: mol_type = other DNA
acacatcatacaaaaaatcaaag

SEQ ID NO: 677 - DNA, 23 bp, synthetic construct
  misc_feature 1..23: note = Description of Artificial Sequence: Synthetic oligonucleotide
  source 1..23: mol_type = other DNA
caaaaaatcaaagaatgttttag

SEQ ID NO: 678 - DNA, 23 bp, synthetic construct
  misc_feature 1..23: note = Description of Artificial Sequence: Synthetic oligonucleotide
  source 1..23: mol_type = other DNA
tttagaaaacttcctattaacag

SEQ ID NO: 679 - DNA, 23 bp, synthetic construct
  misc_feature 1..23: note = Description of Artificial Sequence: Synthetic oligonucleotide
  source 1..23: mol_type = other DNA
ttagaaaacttcctattaacagg

SEQ ID NO: 680 - DNA, 23 bp, synthetic construct
  misc_feature 1..23: note = Description of Artificial Sequence: Synthetic oligonucleotide
  source 1..23: mol_type = other DNA
ctattaacaggcctattgattgg

SEQ ID NO: 681 - DNA, 23 bp, synthetic construct
  misc_feature 1..23: note = Description of Artificial Sequence: Synthetic oligonucleotide
  source 1..23: mol_type = other DNA
taacaggcctattgattggaaag

SEQ ID NO: 682 - DNA, 23 bp, synthetic construct
  misc_feature 1..23: note = Description of Artificial Sequence: Synthetic oligonucleotide
  source 1..23: mol_type = other DNA
gaaagtatgtcaacgaattgtgg

SEQ ID NO: 683 - DNA, 23 bp, synthetic construct
  misc_feature 1..23: note = Description of Artificial Sequence: Synthetic oligonucleotide
  source 1..23: mol_type = other DNA
aaagtatgtcaacgaattgtggg

SEQ ID NO: 684 - DNA, 23 bp, synthetic construct
  misc_feature 1..23: note = Description of Artificial Sequence: Synthetic oligonucleotide
  source 1..23: mol_type = other DNA
tcaacgaattgtgggtcttttgg

SEQ ID NO: 685 - DNA, 23 bp, synthetic construct
  misc_feature 1..23: note = Description of Artificial Sequence: Synthetic oligonucleotide
  source 1..23: mol_type = other DNA
caacgaattgtgggtcttttggg

SEQ ID NO: 686 - DNA, 23 bp, synthetic construct
  misc_feature 1..23: note = Description of Artificial Sequence: Synthetic oligonucleotide
  source 1..23: mol_type = other DNA
gctgccccatttacacaatgtgg

SEQ ID NO: 687 - DNA, 23 bp, synthetic construct
  misc_feature 1..23: note = Description of Artificial Sequence: Synthetic oligonucleotide
  source 1..23: mol_type = other DNA
tgtatgcatgtattcaatctaag

SEQ ID NO: 688 - DNA, 23 bp, synthetic construct
  misc_feature 1..23: note = Description of Artificial Sequence: Synthetic oligonucleotide
  source 1..23: mol_type = other DNA
atgcatgtattcaatctaagcag

SEQ ID NO: 689 - DNA, 23 bp, synthetic construct
  misc_feature 1..23: note = Description of Artificial Sequence: Synthetic oligonucleotide
  source 1..23: mol_type = other DNA
tgcatgtattcaatctaagcagg

SEQ ID NO: 690 - DNA, 23 bp, synthetic construct
  misc_feature 1..23: note = Description of Artificial Sequence: Synthetic oligonucleotide
  source 1..23: mol_type = other DNA
tcactttctcgccaacttacaag

SEQ ID NO: 691 - DNA, 23 bp, synthetic construct
  misc_feature 1..23: note = Description of Artificial Sequence: Synthetic oligonucleotide
  source 1..23: mol_type = other DNA
cactttctcgccaacttacaagg

SEQ ID NO: 692 - DNA, 23 bp, synthetic construct
  misc_feature 1..23: note = Description of Artificial Sequence: Synthetic oligonucleotide
  source 1..23: mol_type = other DNA
tgaacctttaccccgttgcccgg

SEQ ID NO: 693 - DNA, 23 bp, synthetic construct
  misc_feature 1..23: note = Description of Artificial Sequence: Synthetic oligonucleotide
  source 1..23: mol_type = other DNA
tttaccccgttgcccggcaacgg

SEQ ID NO: 694 - DNA, 23 bp, synthetic construct
  misc_feature 1..23: note = Description of Artificial Sequence: Synthetic oligonucleotide
  source 1..23: mol_type = other DNA
ccccgttgcccggcaacggccag

SEQ ID NO: 695 - DNA, 23 bp, synthetic construct
  misc_feature 1..23: note = Description of Artificial Sequence: Synthetic oligonucleotide
  source 1..23: mol_type = other DNA
cccgttgcccggcaacggccagg

SEQ ID NO: 696 - DNA, 23 bp, synthetic construct
  misc_feature 1..23: note = Description of Artificial Sequence: Synthetic oligonucleotide
  source 1..23: mol_type = other DNA
gcaacggccaggtctgtgccaag

SEQ ID NO: 697 - DNA, 23 bp, synthetic construct
  misc_feature 1..23: note = Description of Artificial Sequence: Synthetic oligonucleotide
  source 1..23: mol_type = other DNA
tttgctgacgcaacccccactgg

SEQ ID NO: 698 - DNA, 23 bp, synthetic construct
  misc_feature 1..23: note = Description of Artificial Sequence: Synthetic oligonucleotide
  source 1..23: mol_type = other DNA
ctgacgcaacccccactggctgg

SEQ ID NO: 699 - DNA, 23 bp, synthetic construct
  misc_feature 1..23: note = Description of Artificial Sequence: Synthetic oligonucleotide
  source 1..23: mol_type = other DNA
tgacgcaacccccactggctggg

SEQ ID NO: 700 - DNA, 23 bp, synthetic construct
  misc_feature 1..23: note = Description of Artificial Sequence: Synthetic oligonucleotide
  source 1..23: mol_type = other DNA
gacgcaacccccactggctgggg

SEQ ID NO: 701 - DNA, 23 bp, synthetic construct
  misc_feature 1..23: note = Description of Artificial Sequence: Synthetic oligonucleotide
  source 1..23: mol_type = other DNA
aacccccactggctggggcttgg

SEQ ID NO: 702 - DNA, 23 bp, synthetic construct
  misc_feature 1..23: note = Description of Artificial Sequence: Synthetic oligonucleotide
  source 1..23: mol_type = other DNA
cactggctggggcttggtcatgg

SEQ ID NO: 703 - DNA, 23 bp, synthetic construct
  misc_feature 1..23: note = Description of Artificial Sequence: Synthetic oligonucleotide
  source 1..23: mol_type = other DNA
actggctggggcttggtcatggg

SEQ ID NO: 704 - DNA, 23 bp, synthetic construct
  misc_feature 1..23: note = Description of Artificial Sequence: Synthetic oligonucleotide
  source 1..23: mol_type = other DNA
ggggcttggtcatgggccatcag

SEQ ID NO: 705 - DNA, 23 bp, synthetic construct
  misc_feature 1..23: note = Description of Artificial Sequence: Synthetic oligonucleotide
  source 1..23: mol_type = other DNA
atgggccatcagcgcgtgcgtgg

SEQ ID NO: 706 - DNA, 23 bp, synthetic construct
  misc_feature 1..23: note = Description of Artificial Sequence: Synthetic oligonucleotide
  source 1..23: mol_type = other DNA
gcgcgtgcgtggaaccttttcgg

SEQ ID NO: 707 - DNA, 23 bp, synthetic construct
  misc_feature 1..23: note = Description of Artificial Sequence: Synthetic oligonucleotide
  source 1..23: mol_type = other DNA
tcctctgccgatccatactgcgg

SEQ ID NO: 708 - DNA, 23 bp, synthetic construct
  misc_feature 1..23: note = Description of Artificial Sequence: Synthetic oligonucleotide
  source 1..23: mol_type = other DNA
gatccatactgcggaactcctag

SEQ ID NO: 709 - DNA, 23 bp, synthetic construct
  misc_feature 1..23: note = Description of Artificial Sequence: Synthetic oligonucleotide
  source 1..23: mol_type = other DNA
ctagccgcttgttttgctcgcag

SEQ ID NO: 710 - DNA, 23 bp, synthetic construct
  misc_feature 1..23: note = Description of Artificial Sequence: Synthetic oligonucleotide
  source 1..23: mol_type = other DNA
gccgcttgttttgctcgcagcag

SEQ ID NO: 711 - DNA, 23 bp, synthetic construct
  misc_feature 1..23: note = Description of Artificial Sequence: Synthetic oligonucleotide
  source 1..23: mol_type = other DNA
ccgcttgttttgctcgcagcagg

SEQ ID NO: 712 - DNA, 23 bp, synthetic construct
  misc_feature 1..23: note = Description of Artificial Sequence: Synthetic oligonucleotide
  source 1..23: mol_type = other DNA
tgttttgctcgcagcaggtctgg

SEQ ID NO: 713 - DNA, 23 bp, synthetic construct
  misc_feature 1..23: note = Description of Artificial Sequence: Synthetic oligonucleotide
  source 1..23: mol_type = other DNA
ttttgctcgcagcaggtctggag

SEQ ID NO: 714 - DNA, 23 bp, synthetic construct
  misc_feature 1..23: note = Description of Artificial Sequence: Synthetic oligonucleotide
  source 1..23: mol_type = other DNA
aggtctggagcaaacattatcgg

SEQ ID NO: 715 - DNA, 23 bp, synthetic construct
  misc_feature 1..23: note = Description of Artificial Sequence: Synthetic oligonucleotide
  source 1..23: mol_type = other DNA
ggtctggagcaaacattatcggg

SEQ ID NO: 716 - DNA, 23 bp, synthetic construct
  misc_feature 1..23: note = Description of Artificial Sequence: Synthetic oligonucleotide
  source 1..23: mol_type = other DNA
gcaaatatacatcgtatccatgg

SEQ ID NO: 717 - DNA, 23 bp, synthetic construct
  misc_feature 1..23: note = Description of Artificial Sequence: Synthetic oligonucleotide
  source 1..23: mol_type = other DNA
tacatcgtatccatggctgctag

SEQ ID NO: 718 - DNA, 23 bp, synthetic construct
  misc_feature 1..23: note = Description of Artificial Sequence: Synthetic oligonucleotide
  source 1..23: mol_type = other DNA
acatcgtatccatggctgctagg

SEQ ID NO: 719 - DNA, 23 bp, synthetic construct
  misc_feature 1..23: note = Description of Artificial Sequence: Synthetic oligonucleotide
  source 1..23: mol_type = other DNA
tgctaggctgtgctgccaactgg

SEQ ID NO: 720 - DNA, 23 bp, synthetic construct
  misc_feature 1..23: note = Description of Artificial Sequence: Synthetic oligonucleotide
  source 1..23: mol_type = other DNA
gctgccaactggatcctgcgcgg

SEQ ID NO: 721 - DNA, 23 bp, synthetic construct
  misc_feature 1..23: note = Description of Artificial Sequence: Synthetic oligonucleotide
  source 1..23: mol_type = other DNA
ctgccaactggatcctgcgcggg

SEQ ID NO: 722 - DNA, 23 bp, synthetic construct
  misc_feature 1..23: note = Description of Artificial Sequence: Synthetic oligonucleotide
  source 1..23: mol_type = other DNA
gtcctttgtttacgtcccgtcgg

SEQ ID NO: 723 - DNA, 23 bp, synthetic construct
  misc_feature 1..23: note = Description of Artificial Sequence: Synthetic oligonucleotide
  source 1..23: mol_type = other DNA
cccgtcggcgctgaatcctgcgg

SEQ ID NO: 724 - DNA, 23 bp, synthetic construct
  misc_feature 1..23: note = Description of Artificial Sequence: Synthetic oligonucleotide
  source 1..23: mol_type = other DNA
atcctgcggacgacccttctcgg

SEQ ID NO: 725 - DNA, 23 bp, synthetic construct
  misc_feature 1..23: note = Description of Artificial Sequence: Synthetic oligonucleotide
  source 1..23: mol_type = other DNA
tcctgcggacgacccttctcggg

SEQ ID NO: 726 - DNA, 23 bp, synthetic construct
  misc_feature 1..23: note = Description of Artificial Sequence: Synthetic oligonucleotide
  source 1..23: mol_type = other DNA
cctgcggacgacccttctcgggg

SEQ ID NO: 727 - DNA, 23 bp, synthetic construct
  misc_feature 1..23: note = Description of Artificial Sequence: Synthetic oligonucleotide
  source 1..23: mol_type = other DNA
cgacccttctcggggtcgcttgg

SEQ ID NO: 728 - DNA, 23 bp, synthetic construct
  misc_feature 1..23: note = Description of Artificial Sequence: Synthetic oligonucleotide
  source 1..23: mol_type = other DNA
gacccttctcggggtcgcttggg

SEQ ID NO: 729 - DNA, 23 bp, synthetic construct
  misc_feature 1..23: note = Description of Artificial Sequence: Synthetic oligonucleotide
  source 1..23: mol_type = other DNA
tctgccgttccgaccgaccacgg

SEQ ID NO: 730 - DNA, 23 bp, synthetic construct
  misc_feature 1..23: note = Description of Artificial Sequence: Synthetic oligonucleotide
  source 1..23: mol_type = other DNA
ctgccgttccgaccgaccacggg

SEQ ID NO: 731 - DNA, 23 bp, synthetic construct
  misc_feature 1..23: note = Description of Artificial Sequence: Synthetic oligonucleotide
  source 1..23: mol_type = other DNA
tgccgttccgaccgaccacgggg

SEQ ID NO: 732 - DNA, 23 bp, synthetic construct
  misc_feature 1..23: note = Description of Artificial Sequence: Synthetic oligonucleotide
  source 1..23: mol_type = other DNA
ggggcgcacctctctttacgcgg

SEQ ID NO: 733 - DNA, 23 bp, synthetic construct
  misc_feature 1..23: note = Description of Artificial Sequence: Synthetic oligonucleotide
  source 1..23: mol_type = other DNA
gtctgtgccttctcatctgccgg

SEQ ID NO: 734 - DNA, 23 bp, synthetic construct
  misc_feature 1..23: note = Description of Artificial Sequence: Synthetic oligonucleotide
  source 1..23: mol_type = other DNA
cttcacctctgcacgtcgcatgg

SEQ ID NO: 735 - DNA, 23 bp, synthetic construct
  misc_feature 1..23: note = Description of Artificial Sequence: Synthetic oligonucleotide
  source 1..23: mol_type = other DNA
tcacctctgcacgtcgcatggag

SEQ ID NO: 736 - DNA, 23 bp, synthetic construct
  misc_feature 1..23: note = Description of Artificial Sequence: Synthetic oligonucleotide
  source 1..23: mol_type = other DNA
acgcccaccgaatgttgcccaag

SEQ ID NO: 737 - DNA, 23 bp, synthetic construct
  misc_feature 1..23: note = Description of Artificial Sequence: Synthetic oligonucleotide
  source 1..23: mol_type = other DNA
cgcccaccgaatgttgcccaagg

SEQ ID NO: 738 - DNA, 23 bp, synthetic construct
  misc_feature 1..23: note = Description of Artificial Sequence: Synthetic oligonucleotide
  source 1..23: mol_type = other DNA
tgttgcccaaggtcttacataag

SEQ ID NO: 739 - DNA, 23 bp, synthetic construct
  misc_feature 1..23: note = Description of Artificial Sequence: Synthetic oligonucleotide
  source 1..23: mol_type = other DNA
ttgcccaaggtcttacataagag

SEQ ID NO: 740 - DNA, 23 bp, synthetic construct
  misc_feature 1..23: note = Description of Artificial Sequence: Synthetic oligonucleotide
  source 1..23: mol_type = other DNA
tgcccaaggtcttacataagagg

SEQ ID NO: 741 - DNA, 23 bp, synthetic construct
  misc_feature 1..23: note = Description of Artificial Sequence: Synthetic oligonucleotide
  source 1..23: mol_type = other DNA
gtcttacataagaggactcttgg

SEQ ID NO: 742 - DNA, 23 bp, synthetic construct
  misc_feature 1..23: note = Description of Artificial Sequence: Synthetic oligonucleotide
  source 1..23: mol_type = other DNA
caatgtcaacgaccgaccttgag

SEQ ID NO: 743 - DNA, 23 bp, synthetic construct
  misc_feature 1..23: note = Description of Artificial Sequence: Synthetic oligonucleotide
  source 1..23: mol_type = other DNA
aatgtcaacgaccgaccttgagg

SEQ ID NO: 744 - DNA, 23 bp, synthetic construct
  misc_feature 1..23: note = Description of Artificial Sequence: Synthetic oligonucleotide
  source 1..23: mol_type = other DNA
cgaccttgaggcatacttcaaag

SEQ ID NO: 745 - DNA, 23 bp, synthetic construct
  misc_feature 1..23: note = Description of Artificial Sequence: Synthetic oligonucleotide
  source 1..23: mol_type = other DNA
cttcaaagactgtttgtttaaag

SEQ ID NO: 746 - DNA, 23 bp, synthetic construct
  misc_feature 1..23: note = Description of Artificial Sequence: Synthetic oligonucleotide
  source 1..23: mol_type = other DNA
aagactgtttgtttaaagactgg

SEQ ID NO: 747 - DNA, 23 bp, synthetic construct
  misc_feature 1..23: note = Description of Artificial Sequence: Synthetic oligonucleotide
  source 1..23: mol_type = other DNA
agactgtttgtttaaagactggg

SEQ ID NO: 748 - DNA, 23 bp, synthetic construct
  misc_feature 1..23: note = Description of Artificial Sequence: Synthetic oligonucleotide
  source 1..23: mol_type = other DNA
actgtttgtttaaagactgggag

SEQ ID NO: 749 - DNA, 23 bp, synthetic construct
  misc_feature 1..23: note = Description of Artificial Sequence: Synthetic oligonucleotide
  source 1..23: mol_type = other DNA
ctgtttgtttaaagactgggagg

SEQ ID NO: 750 - DNA, 23 bp, synthetic construct
  misc_feature 1..23: note = Description of Artificial Sequence: Synthetic oligonucleotide
  source 1..23: mol_type = other DNA
gtttgtttaaagactgggaggag

SEQ ID NO: 751 - DNA, 23 bp, synthetic construct
  misc_feature 1..23: note = Description of Artificial Sequence: Synthetic oligonucleotide
  source 1..23: mol_type = other DNA
gtttaaagactgggaggagttgg

SEQ ID NO: 752 - DNA, 23 bp, synthetic construct
  misc_feature 1..23: note = Description of Artificial Sequence: Synthetic oligonucleotide
  source 1..23: mol_type = other DNA
tttaaagactgggaggagttggg

SEQ ID NO: 753 - DNA, 23 bp, synthetic construct
  misc_feature 1..23: note = Description of Artificial Sequence: Synthetic oligonucleotide
  source 1..23: mol_type = other DNA
ttaaagactgggaggagttgggg

SEQ ID NO: 754 - DNA, 23 bp, synthetic construct
  misc_feature 1..23: note = Description of Artificial Sequence: Synthetic oligonucleotide
  source 1..23: mol_type = other DNA
taaagactgggaggagttggggg

SEQ ID NO: 755 - DNA, 23 bp, synthetic construct
  misc_feature 1..23: note = Description of Artificial Sequence: Synthetic oligonucleotide
  source 1..23: mol_type = other DNA
aagactgggaggagttgggggag

SEQ ID NO: 756 - DNA, 23 bp, synthetic construct
  misc_feature 1..23: note = Description of Artificial Sequence: Synthetic oligonucleotide
  source 1..23: mol_type = other DNA
agactgggaggagttgggggagg

SEQ ID NO: 757 - DNA, 23 bp, synthetic construct
  misc_feature 1..23: note = Description of Artificial Sequence: Synthetic oligonucleotide
  source 1..23: mol_type = other DNA
actgggaggagttgggggaggag

SEQ ID NO: 758 - DNA, 23 bp, synthetic construct
  misc_feature 1..23: note = Description of Artificial Sequence: Synthetic oligonucleotide
  source 1..23: mol_type = other DNA
gaggagttgggggaggagattag

SEQ ID NO: 759 - DNA, 23 bp, synthetic construct
  misc_feature 1..23: note = Description of Artificial Sequence: Synthetic oligonucleotide
  source 1..23: mol_type = other DNA
tgggggaggagattagattaaag

SEQ ID NO: 760 - DNA, 23 bp, synthetic construct
  misc_feature 1..23: note = Description of Artificial Sequence: Synthetic oligonucleotide
  source 1..23: mol_type = other DNA
gggggaggagattagattaaagg

SEQ ID NO: 761 - DNA, 23 bp, synthetic construct
  misc_feature 1..23: note = Description of Artificial Sequence: Synthetic oligonucleotide
  source 1..23: mol_type = other DNA
tagattaaaggtctttgtactag

SEQ ID NO: 762 - DNA, 23 bp, synthetic construct
  misc_feature 1..23: note = Description of Artificial Sequence: Synthetic oligonucleotide
  source 1..23: mol_type = other DNA
agattaaaggtctttgtactagg

SEQ ID NO: 763 - DNA, 23 bp, synthetic construct
  misc_feature 1..23: note = Description of Artificial Sequence: Synthetic oligonucleotide
  source 1..23: mol_type = other DNA
attaaaggtctttgtactaggag

SEQ ID NO: 764 - DNA, 23 bp, synthetic construct
  misc_feature 1..23: note = Description of Artificial Sequence: Synthetic oligonucleotide
  source 1..23: mol_type = other DNA
ttaaaggtctttgtactaggagg

SEQ ID NO: 765 - DNA, 23 bp, synthetic construct
  misc_feature 1..23: note = Description of Artificial Sequence: Synthetic oligonucleotide
  source 1..23: mol_type = other DNA
gtctttgtactaggaggctgtag

SEQ ID NO: 766 - DNA, 23 bp, synthetic construct
  misc_feature 1..23: note = Description of Artificial Sequence: Synthetic oligonucleotide
  source 1..23: mol_type = other DNA
tctttgtactaggaggctgtagg

SEQ ID NO: 767 - DNA, 23 bp, synthetic construct
  misc_feature 1..23: note = Description of Artificial Sequence: Synthetic oligonucleotide
  source 1..23: mol_type = other DNA
aggaggctgtaggcataaattgg

SEQ ID NO: 768 - DNA, 23 bp, synthetic construct
  misc_feature 1..23: note = Description of Artificial Sequence: Synthetic oligonucleotide
  source 1..23: mol_type = other DNA
gcataaattggtctgcgcaccag

SEQ ID NO: 769 - DNA, 23 bp, synthetic construct
  misc_feature 1..23: note = Description of Artificial Sequence: Synthetic oligonucleotide
  source 1..23: mol_type = other DNA
ttgttcatgtcctactgttcaag

SEQ ID NO: 770 - DNA, 23 bp, synthetic construct
  misc_feature 1..23: note = Description of Artificial Sequence: Synthetic oligonucleotide
  source 1..23: mol_type = other DNA
gtcctactgttcaagcctccaag

SEQ ID NO: 771 - DNA, 23 bp, synthetic construct
  misc_feature 1..23: note = Description of Artificial Sequence: Synthetic oligonucleotide
  source 1..23: mol_type = other DNA
caagcctccaagctgtgccttgg

SEQ ID NO: 772 - DNA, 23 bp, synthetic construct
  misc_feature 1..23: note = Description of Artificial Sequence: Synthetic oligonucleotide
  source 1..23: mol_type = other DNA
aagcctccaagctgtgccttggg

SEQ ID NO: 773 - DNA, 23 bp, synthetic construct
  misc_feature 1..23: note = Description of Artificial Sequence: Synthetic oligonucleotide
  source 1..23: mol_type = other DNA
cctccaagctgtgccttgggtgg

SEQ ID NO: 774 - DNA, 23 bp, synthetic construct
  misc_feature 1..23: note = Description of Artificial Sequence: Synthetic oligonucleotide
  source 1..23: mol_type = other DNA
agctgtgccttgggtggctttgg

SEQ ID NO: 775 - DNA, 23 bp, synthetic construct
  misc_feature 1..23: note = Description of Artificial Sequence: Synthetic oligonucleotide
  source 1..23: mol_type = other DNA
gctgtgccttgggtggctttggg

SEQ ID NO: 776 - DNA, 23 bp, synthetic construct
  misc_feature 1..23: note = Description of Artificial Sequence: Synthetic oligonucleotide
  source 1..23: mol_type = other DNA
ctgtgccttgggtggctttgggg

SEQ ID NO: 777 - DNA, 23 bp, synthetic construct
  misc_feature 1..23: note = Description of Artificial Sequence: Synthetic oligonucleotide
  source 1..23: mol_type = other DNA
ccttgggtggctttggggcatgg

SEQ ID NO: 778 - DNA, 23 bp, synthetic construct
  misc_feature 1..23: note = Description of Artificial Sequence: Synthetic oligonucleotide
  source 1..23: mol_type = other DNA
catggacatcgacccttataaag

SEQ ID NO: 779 - DNA, 23 bp, synthetic construct
  misc_feature 1..23: note = Description of Artificial Sequence: Synthetic oligonucleotide
  source 1..23: mol_type = other DNA
atcgacccttataaagaatttgg

SEQ ID NO: 780 - DNA, 23 bp, synthetic construct
  misc_feature 1..23: note = Description of Artificial Sequence: Synthetic oligonucleotide
  source 1..23: mol_type = other DNA
cgacccttataaagaatttggag

SEQ ID NO: 781 - DNA, 23 bp, synthetic construct
  misc_feature 1..23: note = Description of Artificial Sequence: Synthetic oligonucleotide
  source 1..23: mol_type = other DNA
taaagaatttggagctactgtgg

SEQ ID NO: 782 - DNA, 23 bp, synthetic construct
  misc_feature 1..23: note = Description of Artificial Sequence: Synthetic oligonucleotide
  source 1..23: mol_type = other DNA
aagaatttggagctactgtggag

SEQ ID NO: 783 - DNA, 23 bp, synthetic construct
  misc_feature 1..23: note = Description of Artificial Sequence: Synthetic oligonucleotide
  source 1..23: mol_type = other DNA
gccttctgacttctttccttcag

SEQ ID NO: 784 - DNA, 23 bp, synthetic construct
  misc_feature 1..23: note = Description of Artificial Sequence: Synthetic oligonucleotide
  source 1..23: mol_type = other DNA
tgacttctttccttcagtacgag

SEQ ID NO: 785 - DNA, 23 bp, synthetic construct
  misc_feature 1..23: note = Description of Artificial Sequence: Synthetic oligonucleotide
  source 1..23: mol_type = other DNA
tccttcagtacgagatcttctag

SEQ ID NO: 786 - DNA, 23 bp, synthetic construct
  misc_feature 1..23: note = Description of Artificial Sequence: Synthetic oligonucleotide
  source 1..23: mol_type = other DNA
agatcttctagataccgcctcag

SEQ ID NO: 787 - DNA, 23 bp, synthetic construct
  misc_feature 1..23: note = Description of Artificial Sequence: Synthetic oligonucleotide
  source 1..23: mol_type = other DNA
ataccgcctcagctctgtatcgg

SEQ ID NO: 788 - DNA, 23 bp, synthetic construct
  misc_feature 1..23: note = Description of Artificial Sequence: Synthetic oligonucleotide
  source 1..23: mol_type = other DNA
taccgcctcagctctgtatcggg

SEQ ID NO: 789 - DNA, 23 bp, synthetic construct
  misc_feature 1..23: note = Description of Artificial Sequence: Synthetic oligonucleotide
  source 1..23: mol_type = other DNA
cgcctcagctctgtatcgggaag

SEQ ID NO: 790 - DNA, 23 bp, synthetic construct
  misc_feature 1..23: note = Description of Artificial Sequence: Synthetic oligonucleotide
  source 1..23: mol_type = other DNA
agctctgtatcgggaagccttag

SEQ ID NO: 791 - DNA, 23 bp, synthetic construct
  misc_feature 1..23: note = Description of Artificial Sequence: Synthetic oligonucleotide
  source 1..23: mol_type = other DNA
ctctgtatcgggaagccttagag

SEQ ID NO: 792 - DNA, 23 bp, synthetic construct
  misc_feature 1..23: note = Description of Artificial Sequence: Synthetic oligonucleotide
  source 1..23: mol_type = other DNA
gggaagccttagagtctcctgag

SEQ ID NO: 793 - DNA, 23 bp, synthetic construct
  misc_feature 1..23: note = Description of Artificial Sequence: Synthetic oligonucleotide
  source 1..23: mol_type = other DNA
tcacctcaccatactgcactcag

SEQ ID NO: 794 - DNA, 23 bp, synthetic construct
  misc_feature 1..23: note = Description of Artificial Sequence: Synthetic oligonucleotide
  source 1..23: mol_type = other DNA
cacctcaccatactgcactcagg

SEQ ID NO: 795 - DNA, 23 bp, synthetic construct
  misc_feature 1..23: note = Description of Artificial Sequence: Synthetic oligonucleotide
  source 1..23: mol_type = other DNA
tcaccatactgcactcaggcaag

SEQ ID NO: 796 - DNA, 23 bp, synthetic construct
  misc_feature 1..23: note = Description of Artificial Sequence: Synthetic oligonucleotide
  source 1..23: mol_type = other DNA
tcaggcaagcaattctttgctgg

SEQ ID NO: 797 - DNA, 23 bp, synthetic construct
  misc_feature 1..23: note = Description of Artificial Sequence: Synthetic oligonucleotide
  source 1..23: mol_type = other DNA
caggcaagcaattctttgctggg

SEQ ID NO: 798 - DNA, 23 bp, synthetic construct
  misc_feature 1..23: note = Description of Artificial Sequence: Synthetic oligonucleotide
  source 1..23: mol_type = other DNA
aggcaagcaattctttgctgggg

SEQ ID NO: 799 - DNA, 23 bp, synthetic construct
  misc_feature 1..23: note = Description of Artificial Sequence: Synthetic oligonucleotide
  source 1..23: mol_type = other DNA
ggcaagcaattctttgctggggg

SEQ ID NO: 800 - DNA, 23 bp, synthetic construct
  misc_feature 1..23: note = Description of Artificial Sequence: Synthetic oligonucleotide
  source 1..23: mol_type = other DNA
gcaagcaattctttgctgggggg

SEQ ID NO: 801 - DNA, 23 bp, synthetic construct
  misc_feature 1..23: note = Description of Artificial Sequence: Synthetic oligonucleotide
  source 1..23: mol_type = other DNA
ctggggggaactaatgactctag

SEQ ID NO: 802 - DNA, 23 bp, synthetic construct
  misc_feature 1..23: note = Description of Artificial Sequence: Synthetic oligonucleotide
  source 1..23: mol_type = other DNA
aactaatgactctagctacctgg

SEQ ID NO: 803 - DNA, 23 bp, synthetic construct
  misc_feature 1..23: note = Description of Artificial Sequence: Synthetic oligonucleotide
  source 1..23: mol_type = other DNA
actaatgactctagctacctggg

SEQ ID NO: 804 - DNA, 23 bp, synthetic construct
  misc_feature 1..23: note = Description of Artificial Sequence: Synthetic oligonucleotide
  source 1..23: mol_type = other DNA
aatgactctagctacctgggtgg

SEQ ID NO: 805 - DNA, 23 bp, synthetic construct
  misc_feature 1..23: note = Description of Artificial Sequence: Synthetic oligonucleotide
  source 1..23: mol_type = other DNA
atgactctagctacctgggtggg

SEQ ID NO: 806 - DNA, 23 bp, synthetic construct
  misc_feature 1..23: note = Description of Artificial Sequence: Synthetic oligonucleotide
  source 1..23: mol_type = other DNA
tacctgggtgggtgttaatttgg

SEQ ID NO: 807 - DNA, 23 bp, synthetic construct
  misc_feature 1..23: note = Description of Artificial Sequence: Synthetic oligonucleotide
  source 1..23: mol_type = other DNA
ctgggtgggtgttaatttggaag

SEQ ID NO: 808 - DNA, 23 bp, synthetic construct
  misc_feature 1..23: note = Description of Artificial Sequence: Synthetic oligonucleotide
  source 1..23: mol_type = other DNA
gggtgttaatttggaagatccag

SEQ ID NO: 809 - DNA, 23 bp, synthetic construct
  misc_feature 1..23: note = Description of Artificial Sequence: Synthetic oligonucleotide
  source 1..23: mol_type = other DNA
aatttggaagatccagcatctag

SEQ ID NO: 810 - DNA, 23 bp, synthetic construct
  misc_feature 1..23: note = Description of Artificial Sequence: Synthetic oligonucleotide
  source 1..23: mol_type = other DNA
tttggaagatccagcatctagag

SEQ ID NO: 811 - DNA, 23 bp, synthetic construct
  misc_feature 1..23: note = Description of Artificial Sequence: Synthetic oligonucleotide
  source 1..23: mol_type = other DNA
agatccagcatctagagacctag

SEQ ID NO: 812 - DNA, 23 bp, synthetic construct
  misc_feature 1..23: note = Description of Artificial Sequence: Synthetic oligonucleotide
  source 1..23: mol_type = other DNA
tccagcatctagagacctagtag

SEQ ID NO: 813 - DNA, 23 bp, synthetic construct
  misc_feature 1..23: note = Description of Artificial Sequence: Synthetic oligonucleotide
  source 1..23: mol_type = other DNA
gcatctagagacctagtagtcag

SEQ ID NO: 814 - DNA, 23 bp, synthetic construct
  misc_feature 1..23: note = Description of Artificial Sequence: Synthetic oligonucleotide
  source 1..23: mol_type = other DNA
cagttatgtcaacactaatatgg

SEQ ID NO: 815 - DNA, 23 bp, synthetic construct
  misc_feature 1..23: note = Description of Artificial Sequence: Synthetic oligonucleotide
  source 1..23: mol_type = other DNA
agttatgtcaacactaatatggg

SEQ ID NO: 816 - DNA, 23 bp, synthetic construct
  misc_feature 1..23: note = Description of Artificial Sequence: Synthetic oligonucleotide
  source 1..23: mol_type = other DNA
tcaacactaatatgggcctaaag

SEQ ID NO: 817 - DNA, 23 bp, synthetic construct
  misc_feature 1..23: note = Description of Artificial Sequence: Synthetic oligonucleotide
  source 1..23: mol_type = other DNA
actaatatgggcctaaagttcag

SEQ ID NO: 818 - DNA, 23 bp, synthetic construct
  misc_feature 1..23: note = Description of Artificial Sequence: Synthetic oligonucleotide
  source 1..23: mol_type = other DNA
ctaatatgggcctaaagttcagg

SEQ ID NO: 819 - DNA, 23 bp, synthetic construct
  misc_feature 1..23: note = Description of Artificial Sequence: Synthetic oligonucleotide
  source 1..23: mol_type = other DNA
taaagttcaggcaactcttgtgg

SEQ ID NO: 820 - DNA, 23 bp, synthetic construct
  misc_feature 1..23: note = Description of Artificial Sequence: Synthetic oligonucleotide
  source 1..23: mol_type = other DNA
cacatttcttgtctcacttttgg

SEQ ID NO: 821 - DNA, 23 bp, synthetic construct
  misc_feature 1..23: note = Description of Artificial Sequence: Synthetic oligonucleotide
  source 1..23: mol_type = other DNA
atttcttgtctcacttttggaag

SEQ ID NO: 822 - DNA, 23 bp, synthetic construct
  misc_feature 1..23: note = Description of Artificial Sequence: Synthetic oligonucleotide
  source 1..23: mol_type = other DNA
ttcttgtctcacttttggaagag

SEQ ID NO: 823 - DNA, 23 bp, synthetic construct
  misc_feature 1..23: note = Description of Artificial Sequence: Synthetic oligonucleotide
  source 1..23: mol_type = other DNA
ttttggaagagaaaccgttatag

SEQ ID NO: 824 - DNA, 23 bp, synthetic construct
  misc_feature 1..23: note = Description of Artificial Sequence: Synthetic oligonucleotide
  source 1..23: mol_type = other DNA
ttggaagagaaaccgttatagag

SEQ ID NO: 825 - DNA, 23 bp, synthetic construct
  misc_feature 1..23: note = Description of Artificial Sequence: Synthetic oligonucleotide
  source 1..23: mol_type = other DNA
agaaaccgttatagagtatttgg

SEQ ID NO: 826 - DNA, 23 bp, synthetic construct
  misc_feature 1..23: note = Description of Artificial Sequence: Synthetic oligonucleotide
  source 1..23: mol_type = other DNA
atagagtatttggtgtctttcgg

SEQ ID NO: 827 - DNA, 23 bp, synthetic construct
  misc_feature 1..23: note = Description of Artificial Sequence: Synthetic oligonucleotide
  source 1..23: mol_type = other DNA
agagtatttggtgtctttcggag

SEQ ID NO: 828 - DNA, 23 bp, synthetic construct
  misc_feature 1..23: note = Description of Artificial Sequence: Synthetic oligonucleotide
  source 1..23: mol_type = other DNA
atttggtgtctttcggagtgtgg

SEQ ID NO: 829 - DNA, 23 bp, synthetic construct
  misc_feature 1..23: note = Description of Artificial Sequence: Synthetic oligonucleotide
  source 1..23: mol_type = other DNA
agtgtggattcgcactcctccag

SEQ ID NO: 830 - DNA, 23 bp, synthetic construct
  misc_feature 1..23: note = Description of Artificial Sequence: Synthetic oligonucleotide
  source 1..23: mol_type = other DNA
attcgcactcctccagcttatag

SEQ ID NO: 831 - DNA, 23 bp, synthetic construct
  misc_feature 1..23: note = Description of Artificial Sequence: Synthetic oligonucleotide
  source 1..23: mol_type = other DNA
ccctatcctatcaacacttccgg

SEQ ID NO: 832 - DNA, 23 bp, synthetic construct
  misc_feature 1..23: note = Description of Artificial Sequence: Synthetic oligonucleotide
  source 1..23: mol_type = other DNA
cttccggaaactactgttgttag

SEQ ID NO: 833 - DNA, 23 bp, synthetic construct
  misc_feature 1..23: note = Description of Artificial Sequence: Synthetic oligonucleotide
  source 1..23: mol_type = other DNA
aactactgttgttagacgacgag

SEQ ID NO: 834 - DNA, 23 bp, synthetic construct
  misc_feature 1..23: note = Description of Artificial Sequence: Synthetic oligonucleotide
  source 1..23: mol_type = other DNA
actactgttgttagacgacgagg

SEQ ID NO: 835 - DNA, 23 bp, synthetic construct
  misc_feature 1..23: note = Description of Artificial Sequence: Synthetic oligonucleotide
  source 1..23: mol_type = other DNA
actgttgttagacgacgaggcag

SEQ ID NO: 836 - DNA, 23 bp, synthetic construct
  misc_feature 1..23: note = Description of Artificial Sequence: Synthetic oligonucleotide
  source 1..23: mol_type = other DNA
ctgttgttagacgacgaggcagg

SEQ ID NO: 837 - DNA, 23 bp, synthetic construct
  misc_feature 1..23: note = Description of Artificial Sequence: Synthetic oligonucleotide
  source 1..23: mol_type = other DNA
agacgacgaggcaggtcccctag

SEQ ID NO: 838 - DNA, 23 bp, synthetic construct
  misc_feature 1..23: note = Description of Artificial Sequence: Synthetic oligonucleotide
  source 1..23: mol_type = other DNA
cgacgaggcaggtcccctagaag

SEQ ID NO: 839 - DNA, 23 bp, synthetic construct
  misc_feature 1..23: note = Description of Artificial Sequence: Synthetic oligonucleotide
  source 1..23: mol_type = other DNA
cgaggcaggtcccctagaagaag

SEQ ID NO: 840 - DNA, 23 bp, synthetic construct
  misc_feature 1..23: note = Description of Artificial Sequence: Synthetic oligonucleotide
  source 1..23: mol_type = other DNA
agaagaactccctcgcctcgcag

SEQ ID NO: 841 - DNA, 23 bp, synthetic construct
  misc_feature 1..23: note = Description of Artificial Sequence: Synthetic oligonucleotide
  source 1..23: mol_type = other DNA
actccctcgcctcgcagacgaag

SEQ ID NO: 842 - DNA, 23 bp, synthetic construct
  misc_feature 1..23: note = Description of Artificial Sequence: Synthetic oligonucleotide
  source 1..23: mol_type = other DNA
ctccctcgcctcgcagacgaagg

SEQ ID NO: 843 - DNA, 23 bp, synthetic construct
  misc_feature 1..23: note = Description of Artificial Sequence: Synthetic oligonucleotide
  source 1..23: mol_type = other DNA
aggtctcaatcgccgcgtcgcag

SEQ ID NO: 844 - DNA, 23 bp, synthetic construct
  misc_feature 1..23: note = Description of Artificial Sequence: Synthetic oligonucleotide
  source 1..23: mol_type = other DNA
tctcaatcgccgcgtcgcagaag

SEQ ID NO: 845 - DNA, 23 bp, synthetic construct
  misc_feature 1..23: note = Description of Artificial Sequence: Synthetic oligonucleotide
  source 1..23: mol_type = other DNA
gtcgcagaagatctcaatctcgg

SEQ ID NO: 846 - DNA, 23 bp, synthetic construct
  misc_feature 1..23: note = Description of Artificial Sequence: Synthetic oligonucleotide
  source 1..23: mol_type = other DNA
tcgcagaagatctcaatctcggg

SEQ ID NO: 847 - DNA, 23 bp, synthetic construct
  misc_feature 1..23: note = Description of Artificial Sequence: Synthetic oligonucleotide
  source 1..23: mol_type = other DNA
aatctcgggaacctcaatgttag

SEQ ID NO: 848 - DNA, 23 bp, synthetic construct
  misc_feature 1..23: note = Description of Artificial Sequence: Synthetic oligonucleotide
  source 1..23: mol_type = other DNA
acctcaatgttagtattccttgg

SEQ ID NO: 849 - DNA, 23 bp, synthetic construct
  misc_feature 1..23: note = Description of Artificial Sequence: Synthetic oligonucleotide
  source 1..23: mol_type = other DNA
ttagtattccttggactcataag

SEQ ID NO: 850 - DNA, 23 bp, synthetic construct
  misc_feature 1..23: note = Description of Artificial Sequence: Synthetic oligonucleotide
  source 1..23: mol_type = other DNA
tagtattccttggactcataagg

SEQ ID NO: 851 - DNA, 23 bp, synthetic construct
  misc_feature 1..23: note = Description of Artificial Sequence: Synthetic oligonucleotide
  source 1..23: mol_type = other DNA
tattccttggactcataaggtgg

SEQ ID NO: 852 - DNA, 23 bp, synthetic construct
  misc_feature 1..23: note = Description of Artificial Sequence: Synthetic oligonucleotide
  source 1..23: mol_type = other DNA
attccttggactcataaggtggg

SEQ ID NO: 853 - DNA, 23 bp, synthetic construct
  misc_feature 1..23: note = Description of Artificial Sequence: Synthetic oligonucleotide
  source 1..23: mol_type = other DNA
ttccttggactcataaggtgggg

SEQ ID NO: 854 - DNA, 23 bp, synthetic construct
  misc_feature 1..23: note = Description of Artificial Sequence: Synthetic oligonucleotide
  source 1..23: mol_type = other DNA
cataaggtggggaactttactgg

SEQ ID NO: 855 - DNA, 23 bp, synthetic construct
  misc_feature 1..23: note = Description of Artificial Sequence: Synthetic oligonucleotide
  source 1..23: mol_type = other DNA
tacctgtctttaatcctcattgg

SEQ ID NO: 856 - DNA, 23 bp, synthetic construct
  misc_feature 1..23: note = Description of Artificial Sequence: Synthetic oligonucleotide
  source 1..23: mol_type = other DNA
tcctaatatacatttacaccaag

SEQ ID NO: 857 - DNA, 23 bp, synthetic construct
  misc_feature 1..23: note = Description of Artificial Sequence: Synthetic oligonucleotide
  source 1..23: mol_type = other DNA
acattatcaaaaaatgtgaacag

SEQ ID NO: 858 - DNA, 23 bp, synthetic construct
  misc_feature 1..23: note = Description of Artificial Sequence: Synthetic oligonucleotide
  source 1..23: mol_type = other DNA
caaaaaatgtgaacagtttgtag

SEQ ID NO: 859 - DNA, 23 bp, synthetic construct
  misc_feature 1..23: note = Description of Artificial Sequence: Synthetic oligonucleotide
  source 1..23: mol_type = other DNA
aaaaaatgtgaacagtttgtagg

SEQ ID NO: 860 - DNA, 23 bp, synthetic construct
  misc_feature 1..23: note = Description of Artificial Sequence: Synthetic oligonucleotide
  source 1..23: mol_type = other DNA
acagtttgtaggcccacttacag

SEQ ID NO: 861 - DNA, 23 bp, synthetic construct
  misc_feature 1..23: note = Description of Artificial Sequence: Synthetic oligonucleotide
  source 1..23: mol_type = other DNA
taggcccacttacagttaatgag

SEQ ID NO: 862 - DNA, 23 bp, synthetic construct
  misc_feature 1..23: note = Description of Artificial Sequence: Synthetic oligonucleotide
  source 1..23: mol_type = other DNA
ccacttacagttaatgagaaaag

SEQ ID NO: 863 - DNA, 23 bp, synthetic construct
  misc_feature 1..23: note = Description of Artificial Sequence: Synthetic oligonucleotide
  source 1..23: mol_type = other DNA
cttacagttaatgagaaaagaag

SEQ ID NO: 864 - DNA, 23 bp, synthetic construct
  misc_feature 1..23: note = Description of Artificial Sequence: Synthetic oligonucleotide
  source 1..23: mol_type = other DNA
ttgcaattgattatgcctgctag

SEQ ID NO: 865 - DNA, 23 bp, synthetic construct
  misc_feature 1..23: note = Description of Artificial Sequence: Synthetic oligonucleotide
  source 1..23: mol_type = other DNA
tgcaattgattatgcctgctagg

SEQ ID NO: 866 - DNA, 23 bp, synthetic construct
  misc_feature 1..23: note = Description of Artificial Sequence: Synthetic oligonucleotide
  source 1..23: mol_type = other DNA
tgcctgctaggttttatccaaag

SEQ ID NO: 867 - DNA, 23 bp, synthetic construct
  misc_feature 1..23: note = Description of Artificial Sequence: Synthetic oligonucleotide
  source 1..23: mol_type = other DNA
gcctgctaggttttatccaaagg

SEQ ID NO: 868 - DNA, 23 bp, synthetic construct
  misc_feature 1..23: note = Description of Artificial Sequence: Synthetic oligonucleotide
  source 1..23: mol_type = other DNA
ggttaccaaatatttaccattgg

SEQ ID NO: 869 - DNA, 23 bp, synthetic construct
  misc_feature 1..23: note = Description of Artificial Sequence: Synthetic oligonucleotide
  source 1..23: mol_type = other DNA
ccaaatatttaccattggataag

SEQ ID NO: 870 - DNA, 23 bp, synthetic construct
  misc_feature 1..23: note = Description of Artificial Sequence: Synthetic oligonucleotide
  source 1..23: mol_type = other DNA
caaatatttaccattggataagg

SEQ ID NO: 871 - DNA, 23 bp, synthetic construct
  misc_feature 1..23: note = Description of Artificial Sequence: Synthetic oligonucleotide
  source 1..23: mol_type = other DNA
aaatatttaccattggataaggg

SEQ ID NO: 872 - DNA, 23 bp, synthetic construct
  misc_feature 1..23: note = Description of Artificial Sequence: Synthetic oligonucleotide
  source 1..23: mol_type = other DNA
gggtattaaaccttattatccag

SEQ ID NO: 873 - DNA, 23 bp, synthetic construct
  misc_feature 1..23: note = Description of Artificial Sequence: Synthetic oligonucleotide
  source 1..23: mol_type = other DNA
accttattatccagaacatctag

SEQ ID NO: 874 - DNA, 23 bp, synthetic construct
  misc_feature 1..23: note = Description of Artificial Sequence: Synthetic oligonucleotide
  source 1..23: mol_type = other DNA
gttaatcattacttccaaactag

SEQ ID NO: 875 - DNA, 23 bp, synthetic construct
  misc_feature 1..23: note = Description of Artificial Sequence: Synthetic oligonucleotide
  source 1..23: mol_type = other DNA
gacactatttacacactctatgg

SEQ ID NO: 876 - DNA, 23 bp, synthetic construct
  misc_feature 1..23: note = Description of Artificial Sequence: Synthetic oligonucleotide
  source 1..23: mol_type = other DNA
actatttacacactctatggaag

SEQ ID NO: 877 - DNA, 23 bp, synthetic construct
  misc_feature 1..23: note = Description of Artificial Sequence: Synthetic oligonucleotide
  source 1..23: mol_type = other DNA
ctatttacacactctatggaagg

SEQ ID NO: 878 - DNA, 23 bp, synthetic construct
  misc_feature 1..23: note = Description of Artificial Sequence: Synthetic oligonucleotide
  source 1..23: mol_type = other DNA
tttacacactctatggaaggcgg

SEQ ID NO: 879 - DNA, 23 bp, synthetic construct
  misc_feature 1..23: note = Description of Artificial Sequence: Synthetic oligonucleotide
  source 1..23: mol_type = other DNA
ttacacactctatggaaggcggg

SEQ ID NO: 880 - DNA, 23 bp, synthetic construct
  misc_feature 1..23: note = Description of Artificial Sequence: Synthetic oligonucleotide
  source 1..23: mol_type = other DNA
ggaaggcgggtatattatataag

SEQ ID NO: 881 - DNA, 23 bp, synthetic construct
  misc_feature 1..23: note = Description of Artificial Sequence: Synthetic oligonucleotide
  source 1..23: mol_type = other DNA
aaggcgggtatattatataagag

SEQ ID NO: 882 - DNA, 23 bp, synthetic construct
  misc_feature 1..23: note = Description of Artificial Sequence: Synthetic oligonucleotide
  source 1..23: mol_type = other DNA
ggcgggtatattatataagagag

SEQ ID NO: 883 - DNA, 23 bp, synthetic construct
  misc_feature 1..23: note = Description of Artificial Sequence: Synthetic oligonucleotide
  source 1..23: mol_type = other DNA
tataagagagaaacaacacatag

SEQ ID NO: 884 - DNA, 23 bp, synthetic construct
  misc_feature 1..23: note = Description of Artificial Sequence: Synthetic oligonucleotide
  source 1..23: mol_type = other DNA
acacatagcgcctcattttgtgg

SEQ ID NO: 885 - DNA, 23 bp, synthetic construct
  misc_feature 1..23: note = Description of Artificial Sequence: Synthetic oligonucleotide
  source 1..23: mol_type = other DNA
cacatagcgcctcattttgtggg

SEQ ID NO: 886 - DNA, 23 bp, synthetic construct
  misc_feature 1..23: note = Description of Artificial Sequence: Synthetic oligonucleotide
  source 1..23: mol_type = other DNA
tttgtgggtcaccatattcttgg

SEQ ID NO: 887 - DNA, 23 bp, synthetic construct
  misc_feature 1..23: note = Description of Artificial Sequence: Synthetic oligonucleotide
  source 1..23: mol_type = other DNA
ttgtgggtcaccatattcttggg

SEQ ID NO: 888 - DNA, 23 bp, synthetic construct
  misc_feature 1..23: note = Description of Artificial Sequence: Synthetic oligonucleotide
  source 1..23: mol_type = other DNA
gtcaccatattcttgggaacaag

SEQ ID NO: 889 - DNA, 23 bp, synthetic construct
  misc_feature 1..23: note = Description of Artificial Sequence: Synthetic oligonucleotide
  source 1..23: mol_type = other DNA
attcttgggaacaagatctacag

SEQ ID NO: 890 - DNA, 23 bp, synthetic construct
  misc_feature 1..23: note = Description of Artificial Sequence: Synthetic oligonucleotide
  source 1..23: mol_type = other DNA
tgggaacaagatctacagcatgg

SEQ ID NO: 891 - DNA, 23 bp, synthetic construct
  misc_feature 1..23: note = Description of Artificial Sequence: Synthetic oligonucleotide
  source 1..23: mol_type = other DNA
gggaacaagatctacagcatggg

SEQ ID NO: 892 - DNA, 23 bp, synthetic construct
  misc_feature 1..23: note = Description of Artificial Sequence: Synthetic oligonucleotide
  source 1..23: mol_type = other DNA
ggaacaagatctacagcatgggg

SEQ ID NO: 893 - DNA, 23 bp, synthetic construct
  misc_feature 1..23: note = Description of Artificial Sequence: Synthetic oligonucleotide
  source 1..23: mol_type = other DNA
acaagatctacagcatggggcag

SEQ ID NO: 894 - DNA, 23 bp, synthetic construct
  misc_feature 1..23: note = Description of Artificial Sequence: Synthetic oligonucleotide
  source 1..23: mol_type = other DNA
atggggcagaatctttccaccag

SEQ ID NO: 895 - DNA, 23 bp, synthetic construct
  misc_feature 1..23: note = Description of Artificial Sequence: Synthetic oligonucleotide
  source 1..23: mol_type = other DNA
tctttccaccagcaatcctctgg

SEQ ID NO: 896 - DNA, 23 bp, synthetic construct
  misc_feature 1..23: note = Description of Artificial Sequence: Synthetic oligonucleotide
  source 1..23: mol_type = other DNA
ctttccaccagcaatcctctggg

SEQ ID NO: 897 - DNA, 23 bp, synthetic construct
  misc_feature 1..23: note = Description of Artificial Sequence: Synthetic oligonucleotide
  source 1..23: mol_type = other DNA
tgggattctttcccgaccaccag

SEQ ID NO: 898 - DNA, 23 bp, synthetic construct
  misc_feature 1..23: note = Description of Artificial Sequence: Synthetic oligonucleotide
  source 1..23: mol_type = other DNA
attctttcccgaccaccagttgg

SEQ ID NO: 899 - DNA, 23 bp, synthetic construct
  misc_feature 1..23: note = Description of Artificial Sequence: Synthetic oligonucleotide
  source 1..23: mol_type = other DNA
tcccgaccaccagttggatccag

SEQ ID NO: 900 - DNA, 23 bp, synthetic construct
  misc_feature 1..23: note = Description of Artificial Sequence: Synthetic oligonucleotide
  source 1..23: mol_type = other DNA
caccagttggatccagccttcag

SEQ ID NO: 901 - DNA, 23 bp, synthetic construct
  misc_feature 1..23: note = Description of Artificial Sequence: Synthetic oligonucleotide
  source 1..23: mol_type = other DNA
ccagttggatccagccttcagag

SEQ ID NO: 902 - DNA, 23 bp, synthetic construct
  misc_feature 1..23: note = Description of Artificial Sequence: Synthetic oligonucleotide
  source 1..23: mol_type = other DNA
tccagccttcagagcaaacacag

SEQ ID NO: 903 - DNA, 23 bp, synthetic construct
  misc_feature 1..23: note = Description of Artificial Sequence: Synthetic oligonucleotide
  source 1..23: mol_type = other DNA
cagagcaaacacagcaaatccag

SEQ ID NO: 904 - DNA, 23 bp, synthetic construct
  misc_feature 1..23: note = Description of Artificial Sequence: Synthetic oligonucleotide
  source 1..23: mol_type = other DNA
caaacacagcaaatccagattgg

SEQ ID NO: 905 - DNA, 23 bp, synthetic construct
  misc_feature 1..23: note = Description of Artificial Sequence: Synthetic oligonucleotide
  source 1..23: mol_type = other DNA
aaacacagcaaatccagattggg

SEQ ID NO: 906 - DNA, 23 bp, synthetic construct
  misc_feature 1..23: note = Description of Artificial Sequence: Synthetic oligonucleotide
  source 1..23: mol_type = other DNA
attgggacttcaatcccaacaag

SEQ ID NO: 907 - DNA, 23 bp, synthetic construct
  misc_feature 1..23: note = Description of Artificial Sequence: Synthetic oligonucleotide
  source 1..23: mol_type = other DNA
ttgggacttcaatcccaacaagg

SEQ ID NO: 908 - DNA, 23 bp, synthetic construct
  misc_feature 1..23: note = Description of Artificial Sequence: Synthetic oligonucleotide
  source 1..23: mol_type = other DNA
tcaatcccaacaaggacacctgg

SEQ ID NO: 909 - DNA, 23 bp, synthetic construct
  misc_feature 1..23: note = Description of Artificial Sequence: Synthetic oligonucleotide
  source 1..23: mol_type = other DNA
tcccaacaaggacacctggccag

SEQ ID NO: 910 - DNA, 23 bp, synthetic construct
  misc_feature 1..23: note = Description of Artificial Sequence: Synthetic oligonucleotide
  source 1..23: mol_type = other DNA
acacctggccagacgccaacaag

SEQ ID NO: 911 - DNA, 23 bp, synthetic construct
  misc_feature 1..23: note = Description of Artificial Sequence: Synthetic oligonucleotide
  source 1..23: mol_type = other DNA
cacctggccagacgccaacaagg

SEQ ID NO: 912 - DNA, 23 bp, synthetic construct
  misc_feature 1..23: note = Description of Artificial Sequence: Synthetic oligonucleotide
  source 1..23: mol_type = other DNA
ctggccagacgccaacaaggtag

SEQ ID NO: 913 - DNA, 23 bp, synthetic construct
  misc_feature 1..23: note = Description of Artificial Sequence: Synthetic oligonucleotide
  source 1..23: mol_type = other DNA
tggccagacgccaacaaggtagg

SEQ ID NO: 914 - DNA, 23 bp, synthetic construct
  misc_feature 1..23: note = Description of Artificial Sequence: Synthetic oligonucleotide
  source 1..23: mol_type = other DNA
gccagacgccaacaaggtaggag

SEQ ID NO: 915 - DNA, 23 bp, synthetic construct
  misc_feature 1..23: note = Description of Artificial Sequence: Synthetic oligonucleotide
  source 1..23: mol_type = other DNA
gacgccaacaaggtaggagctgg

SEQ ID NO: 916 - DNA, 23 bp, synthetic construct
  misc_feature 1..23: note = Description of Artificial Sequence: Synthetic oligonucleotide
  source 1..23: mol_type = other DNA
cgccaacaaggtaggagctggag

SEQ ID NO: 917 - DNA, 23 bp, synthetic construct
  misc_feature 1..23: note = Description of Artificial Sequence: Synthetic oligonucleotide
  source 1..23: mol_type = other DNA
aaggtaggagctggagcattcgg

SEQ ID NO: 918 - DNA, 23 bp, synthetic construct
  misc_feature 1..23: note = Description of Artificial Sequence: Synthetic oligonucleotide
  source 1..23: mol_type = other DNA
aggtaggagctggagcattcggg

SEQ ID NO: 919 - DNA, 23 bp, synthetic construct
  misc_feature 1..23: note = Description of Artificial Sequence: Synthetic oligonucleotide
  source 1..23: mol_type = other DNA
aggagctggagcattcgggctgg

SEQ ID NO: 920 - DNA, 23 bp, synthetic construct
  misc_feature 1..23: note = Description of Artificial Sequence: Synthetic oligonucleotide
  source 1..23: mol_type = other DNA
ggagctggagcattcgggctggg

SEQ ID NO: 921 - DNA, 23 bp, synthetic construct
  misc_feature 1..23: note = Description of Artificial Sequence: Synthetic oligonucleotide
  source 1..23: mol_type = other DNA
ctgggtttcaccccaccgcacgg

SEQ ID NO: 922 - DNA, 23 bp, synthetic construct
  misc_feature 1..23: note = Description of Artificial Sequence: Synthetic oligonucleotide
  source 1..23: mol_type = other DNA
gggtttcaccccaccgcacggag

SEQ ID NO: 923 - DNA, 23 bp, synthetic construct
  misc_feature 1..23: note = Description of Artificial Sequence: Synthetic oligonucleotide
  source 1..23: mol_type = other DNA
ggtttcaccccaccgcacggagg

SEQ ID NO: 924 - DNA, 23 bp, synthetic construct
  misc_feature 1..23: note = Description of Artificial Sequence: Synthetic oligonucleotide
  source 1..23: mol_type = other DNA
cccaccgcacggaggccttttgg

SEQ ID NO: 925 - DNA, 23 bp, synthetic construct
  misc_feature 1..23: note = Description of Artificial Sequence: Synthetic oligonucleotide
  source 1..23: mol_type = other DNA
ccaccgcacggaggccttttggg

SEQ ID NO: 926 - DNA, 23 bp, synthetic construct
  misc_feature 1..23: note = Description of Artificial Sequence: Synthetic oligonucleotide
  source 1..23: mol_type = other DNA
caccgcacggaggccttttgggg

SEQ ID NO: 927 - DNA, 23 bp, synthetic construct
  misc_feature 1..23: note = Description of Artificial Sequence: Synthetic oligonucleotide
  source 1..23: mol_type = other DNA
cgcacggaggccttttggggtgg

SEQ ID NO: 928 - DNA, 23 bp, synthetic construct
  misc_feature 1..23: note = Description of Artificial Sequence: Synthetic oligonucleotide
  source 1..23: mol_type = other DNA
cacggaggccttttggggtggag

SEQ ID NO: 929 - DNA, 23 bp, synthetic construct
  misc_feature 1..23: note = Description of Artificial Sequence: Synthetic oligonucleotide
  source 1..23: mol_type = other DNA
gccttttggggtggagccctcag

SEQ ID NO: 930 - DNA, 23 bp, synthetic construct
  misc_feature 1..23: note = Description of Artificial Sequence: Synthetic oligonucleotide
  source 1..23: mol_type = other DNA
ccttttggggtggagccctcagg

SEQ ID NO: 931 - DNA, 23 bp, synthetic construct
  misc_feature 1..23: note = Description of Artificial Sequence: Synthetic oligonucleotide
  source 1..23: mol_type = other DNA
tggggtggagccctcaggctcag

SEQ ID NO: 932 - DNA, 23 bp, synthetic construct
  misc_feature 1..23: note = Description of Artificial Sequence: Synthetic oligonucleotide
  source 1..23: mol_type = other DNA
ggggtggagccctcaggctcagg

SEQ ID NO: 933 - DNA, 23 bp, synthetic construct
  misc_feature 1..23: note = Description of Artificial Sequence: Synthetic oligonucleotide
  source 1..23: mol_type = other DNA
gggtggagccctcaggctcaggg

SEQ ID NO: 934 - DNA, 23 bp, synthetic construct
  misc_feature 1..23: note = Description of Artificial Sequence: Synthetic oligonucleotide
  source 1..23: mol_type = other DNA
gggcatactacaaactttgccag

SEQ ID NO: 935 - DNA, 23 bp, synthetic construct
  misc_feature 1..23: note = Description of Artificial Sequence: Synthetic oligonucleotide
  source 1..23: mol_type = other DNA
ctcctgcctccaccaatcgccag

SEQ ID NO: 936 - DNA, 23 bp, synthetic construct
  misc_feature 1..23: note = Description of Artificial Sequence: Synthetic oligonucleotide
  source 1..23: mol_type = other DNA
tgcctccaccaatcgccagacag

SEQ ID NO: 937 - DNA, 23 bp, synthetic construct
  misc_feature 1..23: note = Description of Artificial Sequence: Synthetic oligonucleotide
  source 1..23: mol_type = other DNA
gcctccaccaatcgccagacagg

SEQ ID NO: 938 - DNA, 23 bp, synthetic construct
  misc_feature 1..23: note = Description of Artificial Sequence: Synthetic oligonucleotide
  source 1..23: mol_type = other DNA
tccaccaatcgccagacaggaag

SEQ ID NO: 939 - DNA, 23 bp, synthetic construct
  misc_feature 1..23: note = Description of Artificial Sequence: Synthetic oligonucleotide
  source 1..23: mol_type = other DNA
ccaccaatcgccagacaggaagg

SEQ ID NO: 940 - DNA, 23 bp, synthetic construct
  misc_feature 1..23: note = Description of Artificial Sequence: Synthetic oligonucleotide
  source 1..23: mol_type = other DNA
ccaatcgccagacaggaaggcag

SEQ ID NO: 941 - DNA, 23 bp, synthetic construct
  misc_feature 1..23: note = Description of Artificial Sequence: Synthetic oligonucleotide
  source 1..23: mol_type = other DNA
accccgctgtctccacctttgag

SEQ ID NO: 942 - DNA, 23 bp, synthetic construct
  misc_feature 1..23: note = Description of Artificial Sequence: Synthetic oligonucleotide
  source 1..23: mol_type = other DNA
ctttgagaaacactcatcctcag

SEQ ID NO: 943 - DNA, 23 bp, synthetic construct
  misc_feature 1..23: note = Description of Artificial Sequence: Synthetic oligonucleotide
  source 1..23: mol_type = other DNA
tttgagaaacactcatcctcagg

SEQ ID NO: 944 - DNA, 23 bp, synthetic construct
  misc_feature 1..23: note = Description of Artificial Sequence: Synthetic oligonucleotide
  source 1..23: mol_type = other DNA
acactcatcctcaggccatgcag

SEQ ID NO: 945 - DNA, 23 bp, synthetic construct
  misc_feature 1..23: note = Description of Artificial Sequence: Synthetic oligonucleotide
  source 1..23: mol_type = other DNA
ctcatcctcaggccatgcagtgg

SEQ ID NO: 946 - DNA, 11 bp, synthetic construct
  misc_feature 1..11: note = Description of Artificial Sequence: Synthetic oligonucleotide
  source 1..11: mol_type = other DNA
ttgtggaattc

SEQ ID NO: 947 - DNA, 17 bp, synthetic construct
  misc_feature 1..17: note = Description of Artificial Sequence: Synthetic oligonucleotide
  source 1..17: mol_type = other DNA
gaaaggttgtggaattc

SEQ ID NO: 948 - DNA, 18 bp, synthetic construct
  misc_feature 1..18: note = Description of Artificial Sequence: Synthetic oligonucleotide
  source 1..18: mol_type = other DNA
tgaaaggttgtggaattg

SEQ ID NO: 949 - DNA, 23 bp, synthetic construct
  misc_feature 1..23: note = Description of Artificial Sequence: Synthetic oligonucleotide
  source 1..23: mol_type = other DNA
ccactgcatggcctgaggatgag

SEQ ID NO: 950 - DNA, 23 bp, synthetic construct
  misc_feature 1..23: note = Description of Artificial Sequence: Synthetic oligonucleotide
  source 1..23: mol_type = other DNA
ctgaggatgagtgtttctcaaag

SEQ ID NO: 951 - DNA, 23 bp, synthetic construct
  misc_feature 1..23: note = Description of Artificial Sequence: Synthetic oligonucleotide
  source 1..23: mol_type = other DNA
tgaggatgagtgtttctcaaagg

SEQ ID NO: 952 - DNA, 23 bp, synthetic construct
  misc_feature 1..23: note = Description of Artificial Sequence: Synthetic oligonucleotide
  source 1..23: mol_type = other DNA
ggatgagtgtttctcaaaggtgg

SEQ ID NO: 953 - DNA, 23 bp, synthetic construct
  misc_feature 1..23: note = Description of Artificial Sequence: Synthetic oligonucleotide
  source 1..23: mol_type = other DNA
atgagtgtttctcaaaggtggag

SEQ ID NO: 954 - DNA, 23 bp, synthetic construct
  misc_feature 1..23: note = Description of Artificial Sequence: Synthetic oligonucleotide
  source 1..23: mol_type = other DNA
gtgtttctcaaaggtggagacag

SEQ ID NO: 955 - DNA, 23 bp, synthetic construct
  misc_feature 1..23: note = Description of Artificial Sequence: Synthetic oligonucleotide
  source 1..23: mol_type = other DNA
tttctcaaaggtggagacagcgg

SEQ ID NO: 956 - DNA, 23 bp, synthetic construct
  misc_feature 1..23: note = Description of Artificial Sequence: Synthetic oligonucleotide
  source 1..23: mol_type = other DNA
ttctcaaaggtggagacagcggg

SEQ ID NO: 957 - DNA, 23 bp, synthetic construct
  misc_feature 1..23: note = Description of Artificial Sequence: Synthetic oligonucleotide
  source 1..23: mol_type = other DNA
tctcaaaggtggagacagcgggg

SEQ ID NO: 958 - DNA, 23 bp, synthetic construct
  misc_feature 1..23: note = Description of Artificial Sequence: Synthetic oligonucleotide
  source 1..23: mol_type = other DNA
caaaggtggagacagcggggtag

SEQ ID NO: 959 - DNA, 23 bp, synthetic construct
  misc_feature 1..23: note = Description of Artificial Sequence: Synthetic oligonucleotide
  source 1..23: mol_type = other DNA
aaaggtggagacagcggggtagg

SEQ ID NO: 960 - DNA, 23 bp, synthetic construct
  misc_feature 1..23: note = Description of Artificial Sequence: Synthetic oligonucleotide
  source 1..23: mol_type = other DNA
gggtaggctgccttcctgtctgg

SEQ ID NO: 961 - DNA, 23 bp, synthetic construct
  misc_feature 1..23: note = Description of Artificial Sequence: Synthetic oligonucleotide
  source 1..23: mol_type = other DNA
ctgccttcctgtctggcgattgg

SEQ ID NO: 962 - DNA, 23 bp, synthetic construct
  misc_feature 1..23: note = Description of Artificial Sequence: Synthetic oligonucleotide
  source 1..23: mol_type = other DNA
ccttcctgtctggcgattggtgg

SEQ ID NO: 963 - DNA, 23 bp, synthetic construct
  misc_feature 1..23: note = Description of Artificial Sequence: Synthetic oligonucleotide
  source 1..23: mol_type = other DNA
ttcctgtctggcgattggtggag

SEQ ID NO: 964 - DNA, 23 bp, synthetic construct
  misc_feature 1..23: note = Description of Artificial Sequence: Synthetic oligonucleotide
  source 1..23: mol_type = other DNA
tcctgtctggcgattggtggagg

SEQ ID NO: 965 - DNA, 23 bp, synthetic construct
  misc_feature 1..23: note = Description of Artificial Sequence: Synthetic oligonucleotide
  source 1..23: mol_type = other DNA
tgtctggcgattggtggaggcag

SEQ ID NO: 966 - DNA, 23 bp, synthetic construct
  misc_feature 1..23: note = Description of Artificial Sequence: Synthetic oligonucleotide
  source 1..23: mol_type = other DNA
gtctggcgattggtggaggcagg

SEQ ID NO: 967 - DNA, 23 bp, synthetic construct
  misc_feature 1..23: note = Description of Artificial Sequence: Synthetic oligonucleotide
  source 1..23: mol_type = other DNA
ctggcgattggtggaggcaggag

SEQ ID NO: 968 - DNA, 23 bp, synthetic construct
  misc_feature 1..23: note = Description of Artificial Sequence: Synthetic oligonucleotide
  source 1..23: mol_type = other DNA
tggcgattggtggaggcaggagg

SEQ ID NO: 969 - DNA, 23 bp, synthetic construct
  misc_feature 1..23: note = Description of Artificial Sequence: Synthetic oligonucleotide
  source 1..23: mol_type = other DNA
cgattggtggaggcaggaggcgg

SEQ ID NO: 970 - DNA, 23 bp, synthetic construct
  misc_feature 1..23: note = Description of Artificial Sequence: Synthetic oligonucleotide
  source 1..23: mol_type = other DNA
gaggcaggaggcggatttgctgg

SEQ ID NO: 971 - DNA, 23 bp, synthetic construct
  misc_feature 1..23: note = Description of Artificial Sequence: Synthetic oligonucleotide
  source 1..23: mol_type = other DNA
aggaggcggatttgctggcaaag

SEQ ID NO: 972 - DNA, 23 bp, synthetic construct
  misc_feature 1..23: note = Description of Artificial Sequence: Synthetic oligonucleotide
  source 1..23: mol_type = other DNA
ggatttgctggcaaagtttgtag

SEQ ID NO: 973 - DNA, 23 bp, synthetic construct
  misc_feature 1..23: note = Description of Artificial Sequence: Synthetic oligonucleotide
  source 1..23: mol_type = other DNA
caaagtttgtagtatgccctgag

SEQ ID NO: 974 - DNA, 23 bp, synthetic construct
  misc_feature 1..23: note = Description of Artificial Sequence: Synthetic oligonucleotide
  source 1..23: mol_type = other DNA
ttgtagtatgccctgagcctgag

SEQ ID NO: 975 - DNA, 23 bp, synthetic construct
  misc_feature 1..23: note = Description of Artificial Sequence: Synthetic oligonucleotide
  source 1..23: mol_type = other DNA
tgtagtatgccctgagcctgagg

SEQ ID NO: 976 - DNA, 23 bp, synthetic construct
  misc_feature 1..23: note = Description of Artificial Sequence: Synthetic oligonucleotide
  source 1..23: mol_type = other DNA
gtagtatgccctgagcctgaggg

SEQ ID NO: 977 - DNA, 23 bp, synthetic construct
  misc_feature 1..23: note = Description of Artificial Sequence: Synthetic oligonucleotide
  source 1..23: mol_type = other DNA
gcctgagggctccaccccaaaag

SEQ ID NO: 978 - DNA, 23 bp, synthetic construct
  misc_feature 1..23: note = Description of Artificial Sequence: Synthetic oligonucleotide
  source 1..23: mol_type = other DNA
cctgagggctccaccccaaaagg

SEQ ID NO: 979 - DNA, 23 bp, synthetic construct
  misc_feature 1..23: note = Description of Artificial Sequence: Synthetic oligonucleotide
  source 1..23: mol_type = other DNA
caccccaaaaggcctccgtgcgg

SEQ ID NO: 980 - DNA, 23 bp, synthetic construct
  misc_feature 1..23: note = Description of Artificial Sequence: Synthetic oligonucleotide
  source 1..23: mol_type = other DNA
cccaaaaggcctccgtgcggtgg

SEQ ID NO: 981 - DNA, 23 bp, synthetic construct
  misc_feature 1..23: note = Description of Artificial Sequence: Synthetic oligonucleotide
  source 1..23: mol_type = other DNA
ccaaaaggcctccgtgcggtggg

SEQ ID NO: 982 - DNA, 23 bp, synthetic construct
  misc_feature 1..23: note = Description of Artificial Sequence: Synthetic oligonucleotide
  source 1..23: mol_type = other DNA
caaaaggcctccgtgcggtgggg

SEQ ID NO: 983 - DNA, 23 bp, synthetic construct
  misc_feature 1..23: note = Description of Artificial Sequence: Synthetic oligonucleotide
  source 1..23: mol_type = other DNA
ccgtgcggtggggtgaaacccag

SEQ ID NO: 984 - DNA, 23 bp, synthetic construct
  misc_feature 1..23: note = Description of Artificial Sequence: Synthetic oligonucleotide
  source 1..23: mol_type = other DNA
gaaacccagcccgaatgctccag

SEQ ID NO: 985 - DNA, 23 bp, synthetic construct
  misc_feature 1..23: note = Description of Artificial Sequence: Synthetic oligonucleotide
  source 1..23: mol_type = other DNA
tgctccagctcctaccttgttgg

SEQ ID NO: 986 - DNA, 23 bp, synthetic construct
  misc_feature 1..23: note = Description of Artificial Sequence: Synthetic oligonucleotide
  source 1..23: mol_type = other DNA
gctcctaccttgttggcgtctgg

SEQ ID NO: 987 - DNA, 23 bp, synthetic construct
  misc_feature 1..23: note = Description of Artificial Sequence: Synthetic oligonucleotide
  source 1..23: mol_type = other DNA
ctaccttgttggcgtctggccag

SEQ ID NO: 988 - DNA, 23 bp, synthetic construct
  misc_feature 1..23: note = Description of Artificial Sequence: Synthetic oligonucleotide
  source 1..23: mol_type = other DNA
taccttgttggcgtctggccagg

SEQ ID NO: 989 - DNA, 23 bp, synthetic construct
  misc_feature 1..23: note = Description of Artificial Sequence: Synthetic oligonucleotide
  source 1..23: mol_type = other DNA
gtctggccaggtgtccttgttgg

SEQ ID NO: 990 - DNA, 23 bp, synthetic construct
  misc_feature 1..23: note = Description of Artificial Sequence: Synthetic oligonucleotide
  source 1..23: mol_type = other DNA
tctggccaggtgtccttgttggg

SEQ ID NO: 991 - DNA, 23 bp, synthetic construct
  misc_feature 1..23: note = Description of Artificial Sequence: Synthetic oligonucleotide
  source 1..23: mol_type = other DNA
aggtgtccttgttgggattgaag

SEQ ID NO: 992 - DNA, 23 bp, synthetic construct
  misc_feature 1..23: note = Description of Artificial Sequence: Synthetic oligonucleotide
  source 1..23: mol_type = other DNA
ttgggattgaagtcccaatctgg

SEQ ID NO: 993 - DNA, 23 bp, synthetic construct
  misc_feature 1..23: note = Description of Artificial Sequence: Synthetic oligonucleotide
  source 1..23: mol_type = other DNA
gatttgctgtgtttgctctgaag

SEQ ID NO: 994 - DNA, 23 bp, synthetic construct
  misc_feature 1..23: note = Description of Artificial Sequence: Synthetic oligonucleotide
  source 1..23: mol_type = other DNA
atttgctgtgtttgctctgaagg

SEQ ID NO: 995 - DNA, 23 bp, synthetic construct
  misc_feature 1..23: note = Description of Artificial Sequence: Synthetic oligonucleotide
  source 1..23: mol_type = other DNA
gctgtgtttgctctgaaggctgg

SEQ ID NO: 996 - DNA, 23 bp, synthetic construct
  misc_feature 1..23: note = Description of Artificial Sequence: Synthetic oligonucleotide
  source 1..23: mol_type = other DNA
ctctgaaggctggatccaactgg

SEQ ID NO: 997 - DNA, 23 bp, synthetic construct
  misc_feature 1..23: note = Description of Artificial Sequence: Synthetic oligonucleotide
  source 1..23: mol_type = other DNA
tgaaggctggatccaactggtgg

SEQ ID NO: 998 - DNA, 23 bp, synthetic construct
  misc_feature 1..23: note = Description of Artificial Sequence: Synthetic oligonucleotide
  source 1..23: mol_type = other DNA
ggctggatccaactggtggtcgg

SEQ ID NO: 999 - DNA, 23 bp, synthetic construct
  misc_feature 1..23: note = Description of Artificial Sequence: Synthetic oligonucleotide
  source 1..23: mol_type = other DNA
gctggatccaactggtggtcggg

SEQ ID NO: 1000 - DNA, 23 bp, synthetic construct
  misc_feature 1..23: note = Description of Artificial Sequence: Synthetic oligonucleotide
  source 1..23: mol_type = other DNA
gatccaactggtggtcgggaaag

SEQ ID NO: 1001 - DNA, 23 bp, synthetic construct
  misc_feature 1..23: note = Description of Artificial Sequence: Synthetic oligonucleotide
  source 1..23: mol_type = other DNA
tggtggtcgggaaagaatcccag

SEQ ID NO: 1002 - DNA, 23 bp, synthetic construct
  misc_feature 1..23: note = Description of Artificial Sequence: Synthetic oligonucleotide
  source 1..23: mol_type = other DNA
gtggtcgggaaagaatcccagag

SEQ ID NO: 1003 - DNA, 23 bp, synthetic construct
  misc_feature 1..23: note = Description of Artificial Sequence: Synthetic oligonucleotide
  source 1..23: mol_type = other DNA
tggtcgggaaagaatcccagagg

SEQ ID NO: 1004 - DNA, 23 bp, synthetic construct
  misc_feature 1..23: note = Description of Artificial Sequence: Synthetic oligonucleotide
  source 1..23: mol_type = other DNA
aaagaatcccagaggattgctgg

SEQ ID NO: 1005 - DNA, 23 bp, synthetic construct
  misc_feature 1..23: note = Description of Artificial Sequence: Synthetic oligonucleotide
  source 1..23: mol_type = other DNA
gaatcccagaggattgctggtgg

SEQ ID NO: 1006 - DNA, 23 bp, synthetic construct
  misc_feature 1..23: note = Description of Artificial Sequence: Synthetic oligonucleotide
  source 1..23: mol_type = other DNA
cccagaggattgctggtggaaag

SEQ ID NO: 1007 - DNA, 23 bp, synthetic construct
  misc_feature 1..23: note = Description of Artificial Sequence: Synthetic oligonucleotide
  source 1..23: mol_type = other DNA
aaagattctgccccatgctgtag

SEQ ID NO: 1008 - DNA, 23 bp, synthetic construct
  misc_feature 1..23: note = Description of Artificial Sequence: Synthetic oligonucleotide
  source 1..23: mol_type = other DNA
atgctgtagatcttgttcccaag

SEQ ID NO: 1009 - DNA, 23 bp, synthetic construct
  misc_feature 1..23: note = Description of Artificial Sequence: Synthetic oligonucleotide
  source 1..23: mol_type = other DNA
agatcttgttcccaagaatatgg

SEQ ID NO: 1010 - DNA, 23 bp, synthetic construct
  misc_feature 1..23: note = Description of Artificial Sequence: Synthetic oligonucleotide
  source 1..23: mol_type = other DNA
aatatggtgacccacaaaatgag

SEQ ID NO: 1011 - DNA, 23 bp, synthetic construct
  misc_feature 1..23: note = Description of Artificial Sequence: Synthetic oligonucleotide
  source 1..23: mol_type = other DNA
atatggtgacccacaaaatgagg

SEQ ID NO: 1012 - DNA, 23 bp, synthetic construct
  misc_feature 1..23: note = Description of Artificial Sequence: Synthetic oligonucleotide
  source 1..23: mol_type = other DNA
tataatatacccgccttccatag

SEQ ID NO: 1013 - DNA, 23 bp, synthetic construct
  misc_feature 1..23: note = Description of Artificial Sequence: Synthetic oligonucleotide
  source 1..23: mol_type = other DNA
taatatacccgccttccatagag

SEQ ID NO: 1014 - DNA, 23 bp, synthetic construct
  misc_feature 1..23: note = Description of Artificial Sequence: Synthetic oligonucleotide
  source 1..23: mol_type = other DNA
ccttccatagagtgtgtaaatag

SEQ ID NO: 1015 - DNA, 23 bp, synthetic construct
  misc_feature 1..23: note = Description of Artificial Sequence: Synthetic oligonucleotide
  source 1..23: mol_type = other DNA
tagagtgtgtaaatagtgtctag

SEQ ID NO: 1016 - DNA, 23 bp, synthetic construct
  misc_feature 1..23: note = Description of Artificial Sequence: Synthetic oligonucleotide
  source 1..23: mol_type = other DNA
tgtgtaaatagtgtctagtttgg

SEQ ID NO: 1017 - DNA, 23 bp, synthetic construct
  misc_feature 1..23: note = Description of Artificial Sequence: Synthetic oligonucleotide
  source 1..23: mol_type = other DNA
gtaaatagtgtctagtttggaag

SEQ ID NO: 1018 - DNA, 23 bp, synthetic construct
  misc_feature 1..23: note = Description of Artificial Sequence: Synthetic oligonucleotide
  source 1..23: mol_type = other DNA
gtttggaagtaatgattaactag

SEQ ID NO: 1019 - DNA, 23 bp, synthetic construct
  misc_feature 1..23: note = Description of Artificial Sequence: Synthetic oligonucleotide
  source 1..23: mol_type = other DNA
taatgattaactagatgttctgg

SEQ ID NO: 1020 - DNA, 23 bp, synthetic construct
  misc_feature 1..23: note = Description of Artificial Sequence: Synthetic oligonucleotide
  source 1..23: mol_type = other DNA
aactagatgttctggataataag

SEQ ID NO: 1021 - DNA, 23 bp, synthetic construct
  misc_feature 1..23: note = Description of Artificial Sequence: Synthetic oligonucleotide
  source 1..23: mol_type = other DNA
actagatgttctggataataagg

SEQ ID NO: 1022 - DNA, 23 bp, synthetic construct
  misc_feature 1..23: note = Description of Artificial Sequence: Synthetic oligonucleotide
  source 1..23: mol_type = other DNA
ggtttaatacccttatccaatgg

SEQ ID NO: 1023 - DNA, 23 bp, synthetic construct
  misc_feature 1..23: note = Description of Artificial Sequence: Synthetic oligonucleotide
  source 1..23: mol_type = other DNA
cttatccaatggtaaatatttgg

SEQ ID NO: 1024 - DNA, 23 bp, synthetic construct
  misc_feature 1..23: note = Description of Artificial Sequence: Synthetic oligonucleotide
  source 1..23: mol_type = other DNA
ggtaaatatttggtaacctttgg

SEQ ID NO: 1025 - DNA, 23 bp, synthetic construct
  misc_feature 1..23: note = Description of Artificial Sequence: Synthetic oligonucleotide
  source 1..23: mol_type = other DNA
ggtaacctttggataaaacctag

SEQ ID NO: 1026 - DNA, 23 bp, synthetic construct
  misc_feature 1..23: note = Description of Artificial Sequence: Synthetic oligonucleotide
  source 1..23: mol_type = other DNA
aacctttggataaaacctagcag

SEQ ID NO: 1027 - DNA, 23 bp, synthetic construct
  misc_feature 1..23: note = Description of Artificial Sequence: Synthetic oligonucleotide
  source 1..23: mol_type = other DNA
acctttggataaaacctagcagg

SEQ ID NO: 1028 - DNA, 23 bp, synthetic construct
  misc_feature 1..23: note = Description of Artificial Sequence: Synthetic oligonucleotide
  source 1..23: mol_type = other DNA
cttcttttctcattaactgtaag

SEQ ID NO: 1029 - DNA, 23 bp, synthetic construct
  misc_feature 1..23: note = Description of Artificial Sequence: Synthetic oligonucleotide
  source 1..23: mol_type = other DNA
cttttctcattaactgtaagtgg

SEQ ID NO: 1030 - DNA, 23 bp, synthetic construct
  misc_feature 1..23: note = Description of Artificial Sequence: Synthetic oligonucleotide
  source 1..23: mol_type = other DNA
ttttctcattaactgtaagtggg

SEQ ID NO: 1031 - DNA, 23 bp, synthetic construct
  misc_feature 1..23: note = Description of Artificial Sequence: Synthetic oligonucleotide
  source 1..23: mol_type = other DNA
cacattttttgataatgtcttgg

SEQ ID NO: 1032 - DNA, 23 bp, synthetic construct
  misc_feature 1..23: note = Description of Artificial Sequence: Synthetic oligonucleotide
  source 1..23: mol_type = other DNA
gtcttggtgtaaatgtatattag

SEQ ID NO: 1033 - DNA, 23 bp, synthetic construct
  misc_feature 1..23: note = Description of Artificial Sequence: Synthetic oligonucleotide
  source 1..23: mol_type = other DNA
tcttggtgtaaatgtatattagg

SEQ ID NO: 1034 - DNA, 23 bp, synthetic construct
  misc_feature 1..23: note = Description of Artificial Sequence: Synthetic oligonucleotide
  source 1..23: mol_type = other DNA
gtgtaaatgtatattaggaaaag

SEQ ID NO: 1035 - DNA, 23 bp, synthetic construct
  misc_feature 1..23: note = Description of Artificial Sequence: Synthetic oligonucleotide
  source 1..23: mol_type = other DNA
aaatgtatattaggaaaagatgg

SEQ ID NO: 1036 - DNA, 23 bp, synthetic construct
  misc_feature 1..23: note = Description of Artificial Sequence: Synthetic oligonucleotide
  source 1..23: mol_type = other DNA
aaaagatggtgttttccaatgag

SEQ ID NO: 1037 - DNA, 23 bp, synthetic construct
  misc_feature 1..23: note = Description of Artificial Sequence: Synthetic oligonucleotide
  source 1..23: mol_type = other DNA
aaagatggtgttttccaatgagg

SEQ ID NO: 1038 - DNA, 23 bp, synthetic construct
  misc_feature 1..23: note = Description of Artificial Sequence: Synthetic oligonucleotide
  source 1..23: mol_type = other DNA
gtgttttccaatgaggattaaag

SEQ ID NO: 1039 - DNA, 23 bp, synthetic construct
  misc_feature 1..23: note = Description of Artificial Sequence: Synthetic oligonucleotide
  source 1..23: mol_type = other DNA
tttccaatgaggattaaagacag

SEQ ID NO: 1040 - DNA, 23 bp, synthetic construct
  misc_feature 1..23: note = Description of Artificial Sequence: Synthetic oligonucleotide
  source 1..23: mol_type = other DNA
ttccaatgaggattaaagacagg

SEQ ID NO: 1041 - DNA, 23 bp, synthetic construct
  misc_feature 1..23: note = Description of Artificial Sequence: Synthetic oligonucleotide
  source 1..23: mol_type = other DNA
atgaggattaaagacaggtacag

SEQ ID NO: 1042 - DNA, 23 bp, synthetic construct
  misc_feature 1..23: note = Description of Artificial Sequence: Synthetic oligonucleotide
  source 1..23: mol_type = other DNA
aggattaaagacaggtacagtag

SEQ ID NO: 1043 - DNA, 23 bp, synthetic construct
  misc_feature 1..23: note = Description of Artificial Sequence: Synthetic oligonucleotide
  source 1..23: mol_type = other DNA
attaaagacaggtacagtagaag

SEQ ID NO: 1044 - DNA, 23 bp, synthetic construct
  misc_feature 1..23: note = Description of Artificial Sequence: Synthetic oligonucleotide
  source 1..23: mol_type = other DNA
acaggtacagtagaagaataaag

SEQ ID NO: 1045 - DNA, 23 bp, synthetic construct
  misc_feature 1..23: note = Description of Artificial Sequence: Synthetic oligonucleotide
  source 1..23: mol_type = other DNA
tacagtagaagaataaagaccag

SEQ ID NO: 1046 - DNA, 23 bp, synthetic construct
  misc_feature 1..23: note = Description of Artificial Sequence: Synthetic oligonucleotide
  source 1..23: mol_type = other DNA
tagaagaataaagaccagtaaag

SEQ ID NO: 1047 - DNA, 23 bp, synthetic construct
  misc_feature 1..23: note = Description of Artificial Sequence: Synthetic oligonucleotide
  source 1..23: mol_type = other DNA
agtaaagttccccaccttatgag

SEQ ID NO: 1048 - DNA, 23 bp, synthetic construct
  misc_feature 1..23: note = Description of Artificial Sequence: Synthetic oligonucleotide
  source 1..23: mol_type = other DNA
gttccccaccttatgagtccaag

SEQ ID NO: 1049 - DNA, 23 bp, synthetic construct
  misc_feature 1..23: note = Description of Artificial Sequence: Synthetic oligonucleotide
  source 1..23: mol_type = other DNA
ttccccaccttatgagtccaagg

SEQ ID NO: 1050 - DNA, 23 bp, synthetic construct
  misc_feature 1..23: note = Description of Artificial Sequence: Synthetic oligonucleotide
  source 1..23: mol_type = other DNA
gtccaaggaatactaacattgag

SEQ ID NO: 1051 - DNA, 23 bp, synthetic construct
  misc_feature 1..23: note = Description of Artificial Sequence: Synthetic oligonucleotide
  source 1..23: mol_type = other DNA
tccaaggaatactaacattgagg

SEQ ID NO: 1052 - DNA, 23 bp, synthetic construct
  misc_feature 1..23: note = Description of Artificial Sequence: Synthetic oligonucleotide
  source 1..23: mol_type = other DNA
atactaacattgaggttcccgag

SEQ ID NO: 1053 - DNA, 23 bp, synthetic construct
  misc_feature 1..23: note = Description of Artificial Sequence: Synthetic oligonucleotide
  source 1..23: mol_type = other DNA
acattgaggttcccgagattgag

SEQ ID NO: 1054 - DNA, 23 bp, synthetic construct
  misc_feature 1..23: note = Description of Artificial Sequence: Synthetic oligonucleotide
  source 1..23: mol_type = other DNA
gattgagatcttctgcgacgcgg

SEQ ID NO: 1055 - DNA, 23 bp, synthetic construct
  misc_feature 1..23: note = Description of Artificial Sequence: Synthetic oligonucleotide
  source 1..23: mol_type = other DNA
tcttctgcgacgcggcgattgag

SEQ ID NO: 1056 - DNA, 23 bp, synthetic construct
  misc_feature 1..23: note = Description of Artificial Sequence: Synthetic oligonucleotide
  source 1..23: mol_type = other DNA
cgattgagaccttcgtctgcgag

SEQ ID NO: 1057 - DNA, 23 bp, synthetic construct
  misc_feature 1..23: note = Description of Artificial Sequence: Synthetic oligonucleotide
  source 1..23: mol_type = other DNA
gattgagaccttcgtctgcgagg

SEQ ID NO: 1058 - DNA, 23 bp, synthetic construct
  misc_feature 1..23: note = Description of Artificial Sequence: Synthetic oligonucleotide
  source 1..23: mol_type = other DNA
gagaccttcgtctgcgaggcgag

SEQ ID NO: 1059 - DNA, 23 bp, synthetic construct
  misc_feature 1..23: note = Description of Artificial Sequence: Synthetic oligonucleotide
  source 1..23: mol_type = other DNA
agaccttcgtctgcgaggcgagg

SEQ ID NO: 1060 - DNA, 23 bp, synthetic construct
  misc_feature 1..23: note = Description of Artificial Sequence: Synthetic oligonucleotide
  source 1..23: mol_type = other DNA
gaccttcgtctgcgaggcgaggg

SEQ ID NO: 1061 - DNA, 23 bp, synthetic construct
  misc_feature 1..23: note = Description of Artificial Sequence: Synthetic oligonucleotide
  source 1..23: mol_type = other DNA
ccttcgtctgcgaggcgagggag

SEQ ID NO: 1062 - DNA, 23 bp, synthetic construct
  misc_feature 1..23: note = Description of Artificial Sequence: Synthetic oligonucleotide
  source 1..23: mol_type = other DNA
aggcgagggagttcttcttctag

SEQ ID NO: 1063 - DNA, 23 bp, synthetic construct
  misc_feature 1..23: note = Description of Artificial Sequence: Synthetic oligonucleotide
  source 1..23: mol_type = other DNA
ggcgagggagttcttcttctagg

SEQ ID NO: 1064 - DNA, 23 bp, synthetic construct
  misc_feature 1..23: note = Description of Artificial Sequence: Synthetic oligonucleotide
  source 1..23: mol_type = other DNA
gcgagggagttcttcttctaggg

SEQ ID NO: 1065 - DNA, 23 bp, synthetic construct
  misc_feature 1..23: note = Description of Artificial Sequence: Synthetic oligonucleotide
  source 1..23: mol_type = other DNA
cgagggagttcttcttctagggg

SEQ ID NO: 1066 - DNA, 23 bp, synthetic construct
  misc_feature 1..23: note = Description of Artificial Sequence: Synthetic oligonucleotide
  source 1..23: mol_type = other DNA
cctgcctcgtcgtctaacaacag

SEQ ID NO: 1067 - DNA, 23 bp, synthetic construct
  misc_feature 1..23: note = Description of Artificial Sequence: Synthetic oligonucleotide
  source 1..23: mol_type = other DNA
gcctcgtcgtctaacaacagtag

SEQ ID NO: 1068 - DNA, 23 bp, synthetic construct
  misc_feature 1..23: note = Description of Artificial Sequence: Synthetic oligonucleotide
  source 1..23: mol_type = other DNA
cgtctaacaacagtagtttccgg

SEQ ID NO: 1069 - DNA, 23 bp, synthetic construct
  misc_feature 1..23: note = Description of Artificial Sequence: Synthetic oligonucleotide
  source 1..23: mol_type = other DNA
ctaacaacagtagtttccggaag

SEQ ID NO: 1070 - DNA, 23 bp, synthetic construct
  misc_feature 1..23: note = Description of Artificial Sequence: Synthetic oligonucleotide
  source 1..23: mol_type = other DNA
gtagtttccggaagtgttgatag

SEQ ID NO: 1071 - DNA, 23 bp, synthetic construct
  misc_feature 1..23: note = Description of Artificial Sequence: Synthetic oligonucleotide
  source 1..23: mol_type = other DNA
tagtttccggaagtgttgatagg

SEQ ID NO: 1072 - DNA, 23 bp, synthetic construct
  misc_feature 1..23: note = Description of Artificial Sequence: Synthetic oligonucleotide
  source 1..23: mol_type = other DNA
ttccggaagtgttgataggatag

SEQ ID NO: 1073 - DNA, 23 bp, synthetic construct
  misc_feature 1..23: note = Description of Artificial Sequence: Synthetic oligonucleotide
  source 1..23: mol_type = other DNA
tccggaagtgttgataggatagg

SEQ ID NO: 1074 - DNA, 23 bp, synthetic construct
  misc_feature 1..23: note = Description of Artificial Sequence: Synthetic oligonucleotide
  source 1..23: mol_type = other DNA
ccggaagtgttgataggataggg

SEQ ID NO: 1075 - DNA, 23 bp, synthetic construct
  misc_feature 1..23: note = Description of Artificial Sequence: Synthetic oligonucleotide
  source 1..23: mol_type = other DNA
cggaagtgttgataggatagggg

SEQ ID NO: 1076 - DNA, 23 bp, synthetic construct
  misc_feature 1..23: note = Description of Artificial Sequence: Synthetic oligonucleotide
  source 1..23: mol_type = other DNA
gttgataggataggggcatttgg

SEQ ID NO: 1077 - DNA, 23 bp, synthetic construct
  misc_feature 1..23: note = Description of Artificial Sequence: Synthetic oligonucleotide
  source 1..23: mol_type = other DNA
gataggataggggcatttggtgg

SEQ ID NO: 1078 - DNA, 23 bp, synthetic construct
  misc_feature 1..23: note = Description of Artificial Sequence: Synthetic oligonucleotide
  source 1..23: mol_type = other DNA
aggggcatttggtggtctataag

SEQ ID NO: 1079 - DNA, 23 bp, synthetic construct
  misc_feature 1..23: note = Description of Artificial Sequence: Synthetic oligonucleotide
  source 1..23: mol_type = other DNA
gcatttggtggtctataagctgg

SEQ ID NO: 1080 - DNA, 23 bp, synthetic construct
  misc_feature 1..23: note = Description of Artificial Sequence: Synthetic oligonucleotide
  source 1..23: mol_type = other DNA
atttggtggtctataagctggag

SEQ ID NO: 1081 - DNA, 23 bp, synthetic construct
  misc_feature 1..23: note = Description of Artificial Sequence: Synthetic oligonucleotide
  source 1..23: mol_type = other DNA
tttggtggtctataagctggagg

SEQ ID NO: 1082 - DNA, 23 bp, synthetic construct
  misc_feature 1..23: note = Description of Artificial Sequence: Synthetic oligonucleotide
  source 1..23: mol_type = other DNA
tggtggtctataagctggaggag

SEQ ID NO: 1083 - DNA, 23 bp, synthetic construct
  misc_feature 1..23: note = Description of Artificial Sequence: Synthetic oligonucleotide
  source 1..23: mol_type = other DNA
agtgcgaatccacactccgaaag

SEQ ID NO: 1084 - DNA, 23 bp, synthetic construct
  misc_feature 1..23: note = Description of Artificial Sequence: Synthetic oligonucleotide
  source 1..23: mol_type = other DNA
agacaccaaatactctataacgg

SEQ ID NO: 1085 - DNA, 23 bp, synthetic construct
  misc_feature 1..23: note = Description of Artificial Sequence: Synthetic oligonucleotide
  source 1..23: mol_type = other DNA
tataacggtttctcttccaaaag

SEQ ID NO: 1086 - DNA, 23 bp, synthetic construct
  misc_feature 1..23: note = Description of Artificial Sequence: Synthetic oligonucleotide
  source 1..23: mol_type = other DNA
acggtttctcttccaaaagtgag

SEQ ID NO: 1087 - DNA, 23 bp, synthetic construct
  misc_feature 1..23: note = Description of Artificial Sequence: Synthetic oligonucleotide
  source 1..23: mol_type = other DNA
ttctcttccaaaagtgagacaag

SEQ ID NO: 1088 - DNA, 23 bp, synthetic construct
  misc_feature 1..23: note = Description of Artificial Sequence: Synthetic oligonucleotide
  source 1..23: mol_type = other DNA
gacaagaaatgtgaaaccacaag

SEQ ID NO: 1089 - DNA, 23 bp, synthetic construct
  misc_feature 1..23: note = Description of Artificial Sequence: Synthetic oligonucleotide
  source 1..23: mol_type = other DNA
caagaaatgtgaaaccacaagag

SEQ ID NO: 1090 - DNA, 23 bp, synthetic construct
  misc_feature 1..23: note = Description of Artificial Sequence: Synthetic oligonucleotide
  source 1..23: mol_type = other DNA
cacaagagttgcctgaactttag

SEQ ID NO: 1091 - DNA, 23 bp, synthetic construct
  misc_feature 1..23: note = Description of Artificial Sequence: Synthetic oligonucleotide
  source 1..23: mol_type = other DNA
acaagagttgcctgaactttagg

SEQ ID NO: 1092 - DNA, 23 bp, synthetic construct
  misc_feature 1..23: note = Description of Artificial Sequence: Synthetic oligonucleotide
  source 1..23: mol_type = other DNA
cctgaactttaggcccatattag

SEQ ID NO: 1093 - DNA, 23 bp, synthetic construct
  misc_feature 1..23: note = Description of Artificial Sequence: Synthetic oligonucleotide
  source 1..23: mol_type = other DNA
gtgttgacataactgactactag

SEQ ID NO: 1094 - DNA, 23 bp, synthetic construct
  misc_feature 1..23: note = Description of Artificial Sequence: Synthetic oligonucleotide
  source 1..23: mol_type = other DNA
tgttgacataactgactactagg

SEQ ID NO: 1095 - DNA, 23 bp, synthetic construct
  misc_feature 1..23: note = Description of Artificial Sequence: Synthetic oligonucleotide
  source 1..23: mol_type = other DNA
ataactgactactaggtctctag

SEQ ID NO: 1096 - DNA, 23 bp, synthetic construct
  misc_feature 1..23: note = Description of Artificial Sequence: Synthetic oligonucleotide
  source 1..23: mol_type = other DNA
actactaggtctctagatgctgg

SEQ ID NO: 1097 - DNA, 23 bp, synthetic construct
  misc_feature 1..23: note = Description of Artificial Sequence: Synthetic oligonucleotide
  source 1..23: mol_type = other DNA
cttccaaattaacacccacccag

SEQ ID NO: 1098 - DNA, 23 bp, synthetic construct
  misc_feature 1..23: note = Description of Artificial Sequence: Synthetic oligonucleotide
  source 1..23: mol_type = other DNA
ttccaaattaacacccacccagg

SEQ ID NO: 1099 - DNA, 23 bp, synthetic construct
  misc_feature 1..23: note = Description of Artificial Sequence: Synthetic oligonucleotide
  source 1..23: mol_type = other DNA
caaattaacacccacccaggtag

SEQ ID NO: 1100 - DNA, 23 bp, synthetic construct
  misc_feature 1..23: note = Description of Artificial Sequence: Synthetic oligonucleotide
  source 1..23: mol_type = other DNA
ttaacacccacccaggtagctag

SEQ ID NO: 1101 - DNA, 23 bp, synthetic construct
  misc_feature 1..23: note = Description of Artificial Sequence: Synthetic oligonucleotide
  source 1..23: mol_type = other DNA
aacacccacccaggtagctagag

SEQ ID NO: 1102 - DNA, 23 bp, synthetic construct
  misc_feature 1..23: note = Description of Artificial Sequence: Synthetic oligonucleotide
  source 1..23: mol_type = other DNA
acccaggtagctagagtcattag

SEQ ID NO: 1103 - DNA, 23 bp, synthetic construct
  misc_feature 1..23: note = Description of Artificial Sequence: Synthetic oligonucleotide
  source 1..23: mol_type = other DNA
ctagagtcattagttccccccag

SEQ ID NO: 1104 - DNA, 23 bp, synthetic construct
  misc_feature 1..23: note = Description of Artificial Sequence: Synthetic oligonucleotide
  source 1..23: mol_type = other DNA
gtcattagttccccccagcaaag

SEQ ID NO: 1105 - DNA, 23 bp, synthetic construct
  misc_feature 1..23: note = Description of Artificial Sequence: Synthetic oligonucleotide
  source 1..23: mol_type = other DNA
cagcaaagaattgcttgcctgag

SEQ ID NO: 1106 - DNA, 23 bp, synthetic construct
  misc_feature 1..23: note = Description of Artificial Sequence: Synthetic oligonucleotide
  source 1..23: mol_type = other DNA
aagaattgcttgcctgagtgcag

SEQ ID NO: 1107 - DNA, 23 bp, synthetic construct
  misc_feature 1..23: note = Description of Artificial Sequence: Synthetic oligonucleotide
  source 1..23: mol_type = other DNA
ttgcttgcctgagtgcagtatgg

SEQ ID NO: 1108 - DNA, 23 bp, synthetic construct
  misc_feature 1..23: note = Description of Artificial Sequence: Synthetic oligonucleotide
  source 1..23: mol_type = other DNA
ttgcctgagtgcagtatggtgag

SEQ ID NO: 1109 - DNA, 23 bp, synthetic construct
  misc_feature 1..23: note = Description of Artificial Sequence: Synthetic oligonucleotide
  source 1..23: mol_type = other DNA
tgcctgagtgcagtatggtgagg

SEQ ID NO: 1110 - DNA, 23 bp, synthetic construct
  misc_feature 1..23: note = Description of Artificial Sequence: Synthetic oligonucleotide
  source 1..23: mol_type = other DNA
atggtgaggtgaacaatgctcag

SEQ ID NO: 1111 - DNA, 23 bp, synthetic construct
  misc_feature 1..23: note = Description of Artificial Sequence: Synthetic oligonucleotide
  source 1..23: mol_type = other DNA
tggtgaggtgaacaatgctcagg

SEQ ID NO: 1112 - DNA, 23 bp, synthetic construct
  misc_feature 1..23: note = Description of Artificial Sequence: Synthetic oligonucleotide
  source 1..23: mol_type = other DNA
gtgaggtgaacaatgctcaggag

SEQ ID NO: 1113 - DNA, 23 bp, synthetic construct
  misc_feature 1..23: note = Description of Artificial Sequence: Synthetic oligonucleotide
  source 1..23: mol_type = other DNA
aacaatgctcaggagactctaag

SEQ ID NO: 1114 - DNA, 23 bp, synthetic construct
  misc_feature 1..23: note = Description of Artificial Sequence: Synthetic oligonucleotide
  source 1..23: mol_type = other DNA
acaatgctcaggagactctaagg

SEQ ID NO: 1115 - DNA, 23 bp, synthetic construct
  misc_feature 1..23: note = Description of Artificial Sequence: Synthetic oligonucleotide
  source 1..23: mol_type = other DNA
gactctaaggcttcccgatacag

SEQ ID NO: 1116 - DNA, 23 bp, synthetic construct
  misc_feature 1..23: note = Description of Artificial Sequence: Synthetic oligonucleotide
  source 1..23: mol_type = other DNA
ctctaaggcttcccgatacagag

SEQ ID NO: 1117 - DNA, 23 bp, synthetic construct
  misc_feature 1..23: note = Description of Artificial Sequence: Synthetic oligonucleotide
  source 1..23: mol_type = other DNA
aggcttcccgatacagagctgag

SEQ ID NO: 1118 - DNA, 23 bp, synthetic construct
  misc_feature 1..23: note = Description of Artificial Sequence: Synthetic oligonucleotide
  source 1..23: mol_type = other DNA
ggcttcccgatacagagctgagg

SEQ ID NO: 1119 - DNA, 23 bp, synthetic construct
  misc_feature 1..23: note = Description of Artificial Sequence: Synthetic oligonucleotide
  source 1..23: mol_type = other DNA
ttcccgatacagagctgaggcgg

SEQ ID NO: 1120 - DNA, 23 bp, synthetic construct
  misc_feature 1..23: note = Description of Artificial Sequence: Synthetic oligonucleotide
  source 1..23: mol_type = other DNA
tacagagctgaggcggtatctag

SEQ ID NO: 1121 - DNA, 23 bp, synthetic construct
  misc_feature 1..23: note = Description of Artificial Sequence: Synthetic oligonucleotide
  source 1..23: mol_type = other DNA
agagctgaggcggtatctagaag

SEQ ID NO: 1122 - DNA, 23 bp, synthetic construct
  misc_feature 1..23: note = Description of Artificial Sequence: Synthetic oligonucleotide
  source 1..23: mol_type = other DNA
atctagaagatctcgtactgaag

SEQ ID NO: 1123 - DNA, 23 bp, synthetic construct
  misc_feature 1..23: note = Description of Artificial Sequence: Synthetic oligonucleotide
  source 1..23: mol_type = other DNA
tctagaagatctcgtactgaagg

SEQ ID NO: 1124 - DNA, 23 bp, synthetic construct
  misc_feature 1..23: note = Description of Artificial Sequence: Synthetic oligonucleotide
  source 1..23: mol_type = other DNA
gaagatctcgtactgaaggaaag

SEQ ID NO: 1125 - DNA, 23 bp, synthetic construct
  misc_feature 1..23: note = Description of Artificial Sequence: Synthetic oligonucleotide
  source 1..23: mol_type = other DNA
gatctcgtactgaaggaaagaag

SEQ ID NO: 1126 - DNA, 23 bp, synthetic construct
  misc_feature 1..23: note = Description of Artificial Sequence: Synthetic oligonucleotide
  source 1..23: mol_type = other DNA
tcgtactgaaggaaagaagtcag

SEQ ID NO: 1127 - DNA, 23 bp, synthetic construct
  misc_feature 1..23: note = Description of Artificial Sequence: Synthetic oligonucleotide
  source 1..23: mol_type = other DNA
tactgaaggaaagaagtcagaag

SEQ ID NO: 1128 - DNA, 23 bp, synthetic construct
  misc_feature 1..23: note = Description of Artificial Sequence: Synthetic oligonucleotide
  source 1..23: mol_type = other DNA
actgaaggaaagaagtcagaagg

SEQ ID NO: 1129 - DNA, 23 bp, synthetic construct
  misc_feature 1..23: note = Description of Artificial Sequence: Synthetic oligonucleotide
  source 1..23: mol_type = other DNA
agaagtcagaaggcaaaaacgag

SEQ ID NO: 1130 - DNA, 23 bp, synthetic construct
  misc_feature 1..23: note = Description of Artificial Sequence: Synthetic oligonucleotide
  source 1..23: mol_type = other DNA
aagtcagaaggcaaaaacgagag

SEQ ID NO: 1131 - DNA, 23 bp, synthetic construct
  misc_feature 1..23: note = Description of Artificial Sequence: Synthetic oligonucleotide
  source 1..23: mol_type = other DNA
caaaaacgagagtaactccacag

SEQ ID NO: 1132 - DNA, 23 bp, synthetic construct
  misc_feature 1..23: note = Description of Artificial Sequence: Synthetic oligonucleotide
  source 1..23: mol_type = other DNA
aaacgagagtaactccacagtag

SEQ ID NO: 1133 - DNA, 23 bp, synthetic construct
  misc_feature 1..23: note = Description of Artificial Sequence: Synthetic oligonucleotide
  source 1..23: mol_type = other DNA
agtagctccaaattctttataag

SEQ ID NO: 1134 - DNA, 23 bp, synthetic construct
  misc_feature 1..23: note = Description of Artificial Sequence: Synthetic oligonucleotide
  source 1..23: mol_type = other DNA
gtagctccaaattctttataagg

SEQ ID NO: 1135 - DNA, 23 bp, synthetic construct
  misc_feature 1..23: note = Description of Artificial Sequence: Synthetic oligonucleotide
  source 1..23: mol_type = other DNA
tagctccaaattctttataaggg

SEQ ID NO: 1136 - DNA, 23 bp, synthetic construct
  misc_feature 1..23: note = Description of Artificial Sequence: Synthetic oligonucleotide
  source 1..23: mol_type = other DNA
gggtcgatgtccatgccccaaag

SEQ ID NO: 1137 - DNA, 23 bp, synthetic construct
  misc_feature 1..23: note = Description of Artificial Sequence: Synthetic oligonucleotide
  source 1..23: mol_type = other DNA
tccatgccccaaagccacccaag

SEQ ID NO: 1138 - DNA, 23 bp, synthetic construct
  misc_feature 1..23: note = Description of Artificial Sequence: Synthetic oligonucleotide
  source 1..23: mol_type = other DNA
ccatgccccaaagccacccaagg

SEQ ID NO: 1139 - DNA, 23 bp, synthetic construct
  misc_feature 1..23: note = Description of Artificial Sequence: Synthetic oligonucleotide
  source 1..23: mol_type = other DNA
ccccaaagccacccaaggcacag

SEQ ID NO: 1140 - DNA, 23 bp, synthetic construct
  misc_feature 1..23: note = Description of Artificial Sequence: Synthetic oligonucleotide
  source 1..23: mol_type = other DNA
aagccacccaaggcacagcttgg

SEQ ID NO: 1141 - DNA, 23 bp, synthetic construct
  misc_feature 1..23: note = Description of Artificial Sequence: Synthetic oligonucleotide
  source 1..23: mol_type = other DNA
gccacccaaggcacagcttggag

SEQ ID NO: 1142 - DNA, 23 bp, synthetic construct
  misc_feature 1..23: note = Description of Artificial Sequence: Synthetic oligonucleotide
  source 1..23: mol_type = other DNA
ccacccaaggcacagcttggagg

SEQ ID NO: 1143 - DNA, 23 bp, synthetic construct
  misc_feature 1..23: note = Description of Artificial Sequence: Synthetic oligonucleotide
  source 1..23: mol_type = other DNA
gcacagcttggaggcttgaacag

SEQ ID NO: 1144 - DNA, 23 bp, synthetic construct
  misc_feature 1..23: note = Description of Artificial Sequence: Synthetic oligonucleotide
  source 1..23: mol_type = other DNA
cagcttggaggcttgaacagtag

SEQ ID NO: 1145 - DNA, 23 bp, synthetic construct
  misc_feature 1..23: note = Description of Artificial Sequence: Synthetic oligonucleotide
  source 1..23: mol_type = other DNA
agcttggaggcttgaacagtagg

SEQ ID NO: 1146 - DNA, 23 bp, synthetic construct
  misc_feature 1..23: note = Description of Artificial Sequence: Synthetic oligonucleotide
  source 1..23: mol_type = other DNA
ttgaacagtaggacatgaacaag

SEQ ID NO: 1147 - DNA, 23 bp, synthetic construct
  misc_feature 1..23: note = Description of Artificial Sequence: Synthetic oligonucleotide
  source 1..23: mol_type = other DNA
gaacagtaggacatgaacaagag

SEQ ID NO: 1148 - DNA, 23 bp, synthetic construct
  misc_feature 1..23: note = Description of Artificial Sequence: Synthetic oligonucleotide
  source 1..23: mol_type = other DNA
ggacatgaacaagagatgattag

SEQ ID NO: 1149 - DNA, 23 bp, synthetic construct
  misc_feature 1..23: note = Description of Artificial Sequence: Synthetic oligonucleotide
  source 1..23: mol_type = other DNA
gacatgaacaagagatgattagg

SEQ ID NO: 1150 - DNA, 23 bp, synthetic construct
  misc_feature 1..23: note = Description of Artificial Sequence: Synthetic oligonucleotide
  source 1..23: mol_type = other DNA
atgaacaagagatgattaggcag

SEQ ID NO: 1151 - DNA, 23 bp, synthetic construct
  misc_feature 1..23: note = Description of Artificial Sequence: Synthetic oligonucleotide
  source 1..23: mol_type = other DNA
gaacaagagatgattaggcagag

SEQ ID NO: 1152 - DNA, 23 bp, synthetic construct
  misc_feature 1..23: note = Description of Artificial Sequence: Synthetic oligonucleotide
  source 1..23: mol_type = other DNA
aacaagagatgattaggcagagg

SEQ ID NO: 1153 - DNA, 23 bp, synthetic construct
  misc_feature 1..23: note = Description of Artificial Sequence: Synthetic oligonucleotide
  source 1..23: mol_type = other DNA
atgattaggcagaggtgaaaaag

SEQ ID NO: 1154 - DNA, 23 bp, synthetic construct
  misc_feature 1..23: note = Description of Artificial Sequence: Synthetic oligonucleotide
  source 1..23: mol_type = other DNA
gcagaggtgaaaaagttgcatgg

SEQ ID NO: 1155 - DNA, 23 bp, synthetic construct
  misc_feature 1..23: note = Description of Artificial Sequence: Synthetic oligonucleotide
  source 1..23: mol_type = other DNA
gtgaaaaagttgcatggtgctgg

SEQ ID NO: 1156 - DNA, 23 bp, synthetic construct
  misc_feature 1..23: note = Description of Artificial Sequence: Synthetic oligonucleotide
  source 1..23: mol_type = other DNA
agttgcatggtgctggtgcgcag

SEQ ID NO: 1157 - DNA, 23 bp, synthetic construct
  misc_feature 1..23: note = Description of Artificial Sequence: Synthetic oligonucleotide
  source 1..23: mol_type = other DNA
cgcagaccaatttatgcctacag

SEQ ID NO: 1158 - DNA, 23 bp, synthetic construct
  misc_feature 1..23: note = Description of Artificial Sequence: Synthetic oligonucleotide
  source 1..23: mol_type = other DNA
aatttatgcctacagcctcctag

SEQ ID NO: 1159 - DNA, 23 bp, synthetic construct
  misc_feature 1..23: note = Description of Artificial Sequence: Synthetic oligonucleotide
  source 1..23: mol_type = other DNA
gcctacagcctcctagtacaaag

SEQ ID NO: 1160 - DNA, 23 bp, synthetic construct
  misc_feature 1..23: note = Description of Artificial Sequence: Synthetic oligonucleotide
  source 1..23: mol_type = other DNA
tctcctcccccaactcctcccag

SEQ ID NO: 1161 - DNA, 23 bp, synthetic construct
  misc_feature 1..23: note = Description of Artificial Sequence: Synthetic oligonucleotide
  source 1..23: mol_type = other DNA
cctcccagtctttaaacaaacag

SEQ ID NO: 1162 - DNA, 23 bp, synthetic construct
  misc_feature 1..23: note = Description of Artificial Sequence: Synthetic oligonucleotide
  source 1..23: mol_type = other DNA
ctttaaacaaacagtctttgaag

SEQ ID NO: 1163 - DNA, 23 bp, synthetic construct
  misc_feature 1..23: note = Description of Artificial Sequence: Synthetic oligonucleotide
  source 1..23: mol_type = other DNA
cagtctttgaagtatgcctcaag

SEQ ID NO: 1164 - DNA, 23 bp, synthetic construct
  misc_feature 1..23: note = Description of Artificial Sequence: Synthetic oligonucleotide
  source 1..23: mol_type = other DNA
agtctttgaagtatgcctcaagg

SEQ ID NO: 1165 - DNA, 23 bp, synthetic construct
  misc_feature 1..23: note = Description of Artificial Sequence: Synthetic oligonucleotide
  source 1..23: mol_type = other DNA
tttgaagtatgcctcaaggtcgg

SEQ ID NO: 1166 - DNA, 23 bp, synthetic construct
  misc_feature 1..23: note = Description of Artificial Sequence: Synthetic oligonucleotide
  source 1..23: mol_type = other DNA
aaggtcggtcgttgacattgcag

SEQ ID NO: 1167 - DNA, 23 bp, synthetic construct
  misc_feature 1..23: note = Description of Artificial Sequence: Synthetic oligonucleotide
  source 1..23: mol_type = other DNA
ggtcggtcgttgacattgcagag

SEQ ID NO: 1168 - DNA, 23 bp, synthetic construct
  misc_feature 1..23: note = Description of Artificial Sequence: Synthetic oligonucleotide
  source 1..23: mol_type = other DNA
tcggtcgttgacattgcagagag

SEQ ID NO: 1169 - DNA, 23 bp, synthetic construct
  misc_feature 1..23: note = Description of Artificial Sequence: Synthetic oligonucleotide
  source 1..23: mol_type = other DNA
gttgacattgcagagagtccaag

SEQ ID NO: 1170 - DNA, 23 bp, synthetic construct
  misc_feature 1..23: note = Description of Artificial Sequence: Synthetic oligonucleotide
  source 1..23: mol_type = other DNA
tgacattgcagagagtccaagag

SEQ ID NO: 1171 - DNA, 23 bp, synthetic construct
  misc_feature 1..23: note = Description of Artificial Sequence: Synthetic oligonucleotide
  source 1..23: mol_type = other DNA
gtccaagagtcctcttatgtaag

SEQ ID NO: 1172 - DNA, 23 bp, synthetic construct
  misc_feature 1..23: note = Description of Artificial Sequence: Synthetic oligonucleotide
  source 1..23: mol_type = other DNA
agtcctcttatgtaagaccttgg

SEQ ID NO: 1173 - DNA, 23 bp, synthetic construct
  misc_feature 1..23: note = Description of Artificial Sequence: Synthetic oligonucleotide
  source 1..23: mol_type = other DNA
gtcctcttatgtaagaccttggg

SEQ ID NO: 1174 - DNA, 23 bp, synthetic construct
  misc_feature 1..23: note = Description of Artificial Sequence: Synthetic oligonucleotide
  source 1..23: mol_type = other DNA
gtaagaccttgggcaacattcgg

SEQ ID NO: 1175 - DNA, 23 bp, synthetic construct
  misc_feature 1..23: note = Description of Artificial Sequence: Synthetic oligonucleotide
  source 1..23: mol_type = other DNA
agaccttgggcaacattcggtgg

SEQ ID NO: 1176 - DNA, 23 bp, synthetic construct
  misc_feature 1..23: note = Description of Artificial Sequence: Synthetic oligonucleotide
  source 1..23: mol_type = other DNA
gaccttgggcaacattcggtggg

SEQ ID NO: 1177 - DNA, 23 bp, synthetic construct
  misc_feature 1..23: note = Description of Artificial Sequence: Synthetic oligonucleotide
  source 1..23: mol_type = other DNA
caacattcggtgggcgttcacgg

SEQ ID NO: 1178 - DNA, 23 bp, synthetic construct
  misc_feature 1..23: note = Description of Artificial Sequence: Synthetic oligonucleotide
  source 1..23: mol_type = other DNA
cattcggtgggcgttcacggtgg

SEQ ID NO: 1179 - DNA, 23 bp, synthetic construct
  misc_feature 1..23: note = Description of Artificial Sequence: Synthetic oligonucleotide
  source 1..23: mol_type = other DNA
ggtggtctccatgcgacgtgcag

SEQ ID NO: 1180 - DNA, 23 bp, synthetic construct
  misc_feature 1..23: note = Description of Artificial Sequence: Synthetic oligonucleotide
  source 1..23: mol_type = other DNA
tggtctccatgcgacgtgcagag

SEQ ID NO: 1181 - DNA, 23 bp, synthetic construct
  misc_feature 1..23: note = Description of Artificial Sequence: Synthetic oligonucleotide
  source 1..23: mol_type = other DNA
ggtctccatgcgacgtgcagagg

SEQ ID NO: 1182 - DNA, 23 bp, synthetic construct
  misc_feature 1..23: note = Description of Artificial Sequence: Synthetic oligonucleotide
  source 1..23: mol_type = other DNA
ccatgcgacgtgcagaggtgaag

SEQ ID NO: 1183 - DNA, 23 bp, synthetic construct
  misc_feature 1..23: note = Description of Artificial Sequence: Synthetic oligonucleotide
  source 1..23: mol_type = other DNA
cgacgtgcagaggtgaagcgaag

SEQ ID NO: 1184 - DNA, 23 bp, synthetic construct
  misc_feature 1..23: note = Description of Artificial Sequence: Synthetic oligonucleotide
  source 1..23: mol_type = other DNA
gaggtgaagcgaagtgcacacgg

SEQ ID NO: 1185 - DNA, 23 bp, synthetic construct
  misc_feature 1..23: note = Description of Artificial Sequence: Synthetic oligonucleotide
  source 1..23: mol_type = other DNA
gaagcgaagtgcacacggtccgg

SEQ ID NO: 1186 - DNA, 23 bp, synthetic construct
  misc_feature 1..23: note = Description of Artificial Sequence: Synthetic oligonucleotide
  source 1..23: mol_type = other DNA
gcgaagtgcacacggtccggcag

SEQ ID NO: 1187 - DNA, 23 bp, synthetic construct
  misc_feature 1..23: note = Description of Artificial Sequence: Synthetic oligonucleotide
  source 1..23: mol_type = other DNA
gtgcacacggtccggcagatgag

SEQ ID NO: 1188 - DNA, 23 bp, synthetic construct
  misc_feature 1..23: note = Description of Artificial Sequence: Synthetic oligonucleotide
  source 1..23: mol_type = other DNA
cacacggtccggcagatgagaag

SEQ ID NO: 1189 - DNA, 23 bp, synthetic construct
  misc_feature 1..23: note = Description of Artificial Sequence: Synthetic oligonucleotide
  source 1..23: mol_type = other DNA
acacggtccggcagatgagaagg

SEQ ID NO: 1190 - DNA, 23 bp, synthetic construct
  misc_feature 1..23: note = Description of Artificial Sequence: Synthetic oligonucleotide
  source 1..23: mol_type = other DNA
gtccggcagatgagaaggcacag

SEQ ID NO: 1191 - DNA, 23 bp, synthetic construct
  misc_feature 1..23: note = Description of Artificial Sequence: Synthetic oligonucleotide
  source 1..23: mol_type = other DNA
ggcagatgagaaggcacagacgg

SEQ ID NO: 1192 - DNA, 23 bp, synthetic construct
  misc_feature 1..23: note = Description of Artificial Sequence: Synthetic oligonucleotide
  source 1..23: mol_type = other DNA
gcagatgagaaggcacagacggg

SEQ ID NO: 1193 - DNA, 23 bp, synthetic construct
  misc_feature 1..23: note = Description of Artificial Sequence: Synthetic oligonucleotide
  source 1..23: mol_type = other DNA
cagatgagaaggcacagacgggg

SEQ ID NO: 1194 - DNA, 23 bp, synthetic construct
  misc_feature 1..23: note = Description of Artificial Sequence: Synthetic oligonucleotide
  source 1..23: mol_type = other DNA
gatgagaaggcacagacggggag

SEQ ID NO: 1195 - DNA, 23 bp, synthetic construct
  misc_feature 1..23: note = Description of Artificial Sequence: Synthetic oligonucleotide
  source 1..23: mol_type = other DNA
acagacggggagtccgcgtaaag

SEQ ID NO: 1196 - DNA, 23 bp, synthetic construct
  misc_feature 1..23: note = Description of Artificial Sequence: Synthetic oligonucleotide
  source 1..23: mol_type = other DNA
agacggggagtccgcgtaaagag

SEQ ID NO: 1197 - DNA, 23 bp, synthetic construct
  misc_feature 1..23: note = Description of Artificial Sequence: Synthetic oligonucleotide
  source 1..23: mol_type = other DNA
acggggagtccgcgtaaagagag

SEQ ID NO: 1198 - DNA, 23 bp, synthetic construct
  misc_feature 1..23: note = Description of Artificial Sequence: Synthetic oligonucleotide
  source 1..23: mol_type = other DNA
cggggagtccgcgtaaagagagg

SEQ ID NO: 1199 - DNA, 23 bp, synthetic construct
  misc_feature 1..23: note = Description of Artificial Sequence: Synthetic oligonucleotide
  source 1..23: mol_type = other DNA
gtaaagagaggtgcgccccgtgg

SEQ ID NO: 1200 - DNA, 23 bp, synthetic construct
  misc_feature 1..23: note = Description of Artificial Sequence: Synthetic oligonucleotide
  source 1..23: mol_type = other DNA
agagaggtgcgccccgtggtcgg

SEQ ID NO: 1201 - DNA, 23 bp, synthetic construct
  misc_feature 1..23: note = Description of Artificial Sequence: Synthetic oligonucleotide
  source 1..23: mol_type = other DNA
aggtgcgccccgtggtcggtcgg

SEQ ID NO: 1202 - DNA, 23 bp, synthetic construct
  misc_feature 1..23: note = Description of Artificial Sequence: Synthetic oligonucleotide
  source 1..23: mol_type = other DNA
cgccccgtggtcggtcggaacgg

SEQ ID NO: 1203 - DNA, 23 bp, synthetic construct
  misc_feature 1..23: note = Description of Artificial Sequence: Synthetic oligonucleotide
  source 1..23: mol_type = other DNA
cccgtggtcggtcggaacggcag

SEQ ID NO: 1204 - DNA, 23 bp, synthetic construct
  misc_feature 1..23: note = Description of Artificial Sequence: Synthetic oligonucleotide
  source 1..23: mol_type = other DNA
tggtcggtcggaacggcagacgg

SEQ ID NO: 1205 - DNA, 23 bp, synthetic construct
  misc_feature 1..23: note = Description of Artificial Sequence: Synthetic oligonucleotide
  source 1..23: mol_type = other DNA
gtcggtcggaacggcagacggag

SEQ ID NO: 1206 - DNA, 23 bp, synthetic construct
  misc_feature 1..23: note = Description of Artificial Sequence: Synthetic oligonucleotide
  source 1..23: mol_type = other DNA
ggtcggaacggcagacggagaag

SEQ ID NO: 1207 - DNA, 23 bp, synthetic construct
  misc_feature 1..23: note = Description of Artificial Sequence: Synthetic oligonucleotide
  source 1..23: mol_type = other DNA
gtcggaacggcagacggagaagg

SEQ ID NO: 1208 - DNA, 23 bp, synthetic construct
  misc_feature 1..23: note = Description of Artificial Sequence: Synthetic oligonucleotide
  source 1..23: mol_type = other DNA
tcggaacggcagacggagaaggg

SEQ ID NO: 1209 - DNA, 23 bp, synthetic construct
  misc_feature 1..23: note = Description of Artificial Sequence: Synthetic oligonucleotide
  source 1..23: mol_type = other DNA
cggaacggcagacggagaagggg

SEQ ID NO: 1210 - DNA, 23 bp, synthetic construct
  misc_feature 1..23: note = Description of Artificial Sequence: Synthetic oligonucleotide
  source 1..23: mol_type = other DNA
cggcagacggagaaggggacgag

SEQ ID NO: 1211 - DNA, 23 bp, synthetic construct
  misc_feature 1..23: note = Description of Artificial Sequence: Synthetic oligonucleotide
  source 1..23: mol_type = other DNA
gcagacggagaaggggacgagag

SEQ ID NO: 1212 - DNA, 23 bp, synthetic construct
  misc_feature 1..23: note = Description of Artificial Sequence: Synthetic oligonucleotide
  source 1..23: mol_type = other DNA
agacggagaaggggacgagagag

SEQ ID NO: 1213 - DNA, 23 bp, synthetic construct
  misc_feature 1..23: note = Description of Artificial Sequence: Synthetic oligonucleotide
  source 1..23: mol_type = other DNA
gaaggggacgagagagtcccaag

SEQ ID NO: 1214 - DNA, 23 bp, synthetic construct
  misc_feature 1..23: note = Description of Artificial Sequence: Synthetic oligonucleotide
  source 1..23: mol_type = other DNA
agagagtcccaagcgaccccgag

SEQ ID NO: 1215 - DNA, 23 bp, synthetic construct
  misc_feature 1..23: note = Description of Artificial Sequence: Synthetic oligonucleotide
  source 1..23: mol_type = other DNA
gagtcccaagcgaccccgagaag

SEQ ID NO: 1216 - DNA, 23 bp, synthetic construct
  misc_feature 1..23: note = Description of Artificial Sequence: Synthetic oligonucleotide
  source 1..23: mol_type = other DNA
agtcccaagcgaccccgagaagg

SEQ ID NO: 1217 - DNA, 23 bp, synthetic construct
  misc_feature 1..23: note = Description of Artificial Sequence: Synthetic oligonucleotide
  source 1..23: mol_type = other DNA
gtcccaagcgaccccgagaaggg

SEQ ID NO: 1218 - DNA, 23 bp, synthetic construct
  misc_feature 1..23: note = Description of Artificial Sequence: Synthetic oligonucleotide
  source 1..23: mol_type = other DNA
accccgagaagggtcgtccgcag

SEQ ID NO: 1219 - DNA, 23 bp, synthetic construct
  misc_feature 1..23: note = Description of Artificial Sequence: Synthetic oligonucleotide
  source 1..23: mol_type = other DNA
ccccgagaagggtcgtccgcagg

SEQ ID NO: 1220 - DNA, 23 bp, synthetic construct
  misc_feature 1..23: note = Description of Artificial Sequence: Synthetic oligonucleotide
  source 1..23: mol_type = other DNA
gaagggtcgtccgcaggattcag

SEQ ID NO: 1221 - DNA, 23 bp, synthetic construct
  misc_feature 1..23: note = Description of Artificial Sequence: Synthetic oligonucleotide
  source 1..23: mol_type = other DNA
tccgcaggattcagcgccgacgg

SEQ ID NO: 1222 - DNA, 23 bp, synthetic construct
  misc_feature 1..23: note = Description of Artificial Sequence: Synthetic oligonucleotide
  source 1..23: mol_type = other DNA
ccgcaggattcagcgccgacggg

SEQ ID NO: 1223 - DNA, 23 bp, synthetic construct
  misc_feature 1..23: note = Description of Artificial Sequence: Synthetic oligonucleotide
  source 1..23: mol_type = other DNA
gcgccgacgggacgtaaacaaag

SEQ ID NO: 1224 - DNA, 23 bp, synthetic construct
  misc_feature 1..23: note = Description of Artificial Sequence: Synthetic oligonucleotide
  source 1..23: mol_type = other DNA
cgccgacgggacgtaaacaaagg

SEQ ID NO: 1225 - DNA, 23 bp, synthetic construct
  misc_feature 1..23: note = Description of Artificial Sequence: Synthetic oligonucleotide
  source 1..23: mol_type = other DNA
taaacaaaggacgtcccgcgcag

SEQ ID NO: 1226 - DNA, 23 bp, synthetic construct
  misc_feature 1..23: note = Description of Artificial Sequence: Synthetic oligonucleotide
  source 1..23: mol_type = other DNA
aaacaaaggacgtcccgcgcagg

SEQ ID NO: 1227 - DNA, 23 bp, synthetic construct
  misc_feature 1..23: note = Description of Artificial Sequence: Synthetic oligonucleotide
  source 1..23: mol_type = other DNA
aggacgtcccgcgcaggatccag

SEQ ID NO: 1228 - DNA, 23 bp, synthetic construct
  misc_feature 1..23: note = Description of Artificial Sequence: Synthetic oligonucleotide
  source 1..23: mol_type = other DNA
cgtcccgcgcaggatccagttgg

SEQ ID NO: 1229 - DNA, 23 bp, synthetic construct
  misc_feature 1..23: note = Description of Artificial Sequence: Synthetic oligonucleotide
  source 1..23: mol_type = other DNA
cccgcgcaggatccagttggcag

SEQ ID NO: 1230 - DNA, 23 bp, synthetic construct
  misc_feature 1..23: note = Description of Artificial Sequence: Synthetic oligonucleotide
  source 1..23: mol_type = other DNA
gcaggatccagttggcagcacag

SEQ ID NO: 1231 - DNA, 23 bp, synthetic construct
  misc_feature 1..23: note = Description of Artificial Sequence: Synthetic oligonucleotide
  source 1..23: mol_type = other DNA
atccagttggcagcacagcctag

SEQ ID NO: 1232 - DNA, 23 bp, synthetic construct
  misc_feature 1..23: note = Description of Artificial Sequence: Synthetic oligonucleotide
  source 1..23: mol_type = other DNA
cagttggcagcacagcctagcag

SEQ ID NO: 1233 - DNA, 23 bp, synthetic construct
  misc_feature 1..23: note = Description of Artificial Sequence: Synthetic oligonucleotide
  source 1..23: mol_type = other DNA
gcagcacagcctagcagccatgg

SEQ ID NO: 1234 - DNA, 23 bp, synthetic construct
  misc_feature 1..23: note = Description of Artificial Sequence: Synthetic oligonucleotide
  source 1..23: mol_type = other DNA
atggatacgatgtatatttgcgg

SEQ ID NO: 1235 - DNA, 23 bp, synthetic construct
  misc_feature 1..23: note = Description of Artificial Sequence: Synthetic oligonucleotide
  source 1..23: mol_type = other DNA
tggatacgatgtatatttgcggg

SEQ ID NO: 1236 - DNA, 23 bp, synthetic construct
  misc_feature 1..23: note = Description of Artificial Sequence: Synthetic oligonucleotide
  source 1..23: mol_type = other DNA
gatacgatgtatatttgcgggag

SEQ ID NO: 1237 - DNA, 23 bp, synthetic construct
  misc_feature 1..23: note = Description of Artificial Sequence: Synthetic oligonucleotide
  source 1..23: mol_type = other DNA
tacgatgtatatttgcgggagag

SEQ ID NO: 1238 - DNA, 23 bp, synthetic construct
  misc_feature 1..23: note = Description of Artificial Sequence: Synthetic oligonucleotide
  source 1..23: mol_type = other DNA
acgatgtatatttgcgggagagg

SEQ ID NO: 1239 - DNA, 23 bp, synthetic construct
  misc_feature 1..23: note = Description of Artificial Sequence: Synthetic oligonucleotide
  source 1..23: mol_type = other DNA
atatttgcgggagaggacaacag

SEQ ID NO: 1240 - DNA, 23 bp, synthetic construct
  misc_feature 1..23: note = Description of Artificial Sequence: Synthetic oligonucleotide
  source 1..23: mol_type = other DNA
atttgcgggagaggacaacagag

SEQ ID NO: 1241 - DNA, 23 bp, synthetic construct
  misc_feature 1..23: note = Description of Artificial Sequence: Synthetic oligonucleotide
  source 1..23: mol_type = other DNA
ggagaggacaacagagttatcag

SEQ ID NO: 1242 - DNA, 23 bp, synthetic construct
  misc_feature 1..23: note = Description of Artificial Sequence: Synthetic oligonucleotide
  source 1..23: mol_type = other DNA
agtcccgataatgtttgctccag

SEQ ID NO: 1243 - DNA, 23 bp, synthetic construct
  misc_feature 1..23: note = Description of Artificial Sequence: Synthetic oligonucleotide
  source 1..23: mol_type = other DNA
gtttgctccagacctgctgcgag

SEQ ID NO: 1244 - DNA, 23 bp, synthetic construct
  misc_feature 1..23: note = Description of Artificial Sequence: Synthetic oligonucleotide
  source 1..23: mol_type = other DNA
agacctgctgcgagcaaaacaag

SEQ ID NO: 1245 - DNA, 23 bp, synthetic construct
  misc_feature 1..23: note = Description of Artificial Sequence: Synthetic oligonucleotide
  source 1..23: mol_type = other DNA
cctgctgcgagcaaaacaagcgg

SEQ ID NO: 1246 - DNA, 23 bp, synthetic construct
  misc_feature 1..23: note = Description of Artificial Sequence: Synthetic oligonucleotide
  source 1..23: mol_type = other DNA
ctgcgagcaaaacaagcggctag

SEQ ID NO: 1247 - DNA, 23 bp, synthetic construct
  misc_feature 1..23: note = Description of Artificial Sequence: Synthetic oligonucleotide
  source 1..23: mol_type = other DNA
tgcgagcaaaacaagcggctagg

SEQ ID NO: 1248 - DNA, 23 bp, synthetic construct
  misc_feature 1..23: note = Description of Artificial Sequence: Synthetic oligonucleotide
  source 1..23: mol_type = other DNA
cgagcaaaacaagcggctaggag

SEQ ID NO: 1249 - DNA, 23 bp, synthetic construct
  misc_feature 1..23: note = Description of Artificial Sequence: Synthetic oligonucleotide
  source 1..23: mol_type = other DNA
acaagcggctaggagttccgcag

SEQ ID NO: 1250 - DNA, 23 bp, synthetic construct
  misc_feature 1..23: note = Description of Artificial Sequence: Synthetic oligonucleotide
  source 1..23: mol_type = other DNA
cggctaggagttccgcagtatgg

SEQ ID NO: 1251 - DNA, 23 bp, synthetic construct
  misc_feature 1..23: note = Description of Artificial Sequence: Synthetic oligonucleotide
  source 1..23: mol_type = other DNA
aggagttccgcagtatggatcgg

SEQ ID NO: 1252 - DNA, 23 bp, synthetic construct
  misc_feature 1..23: note = Description of Artificial Sequence: Synthetic oligonucleotide
  source 1..23: mol_type = other DNA
agttccgcagtatggatcggcag

SEQ ID NO: 1253 - DNA, 23 bp, synthetic construct
  misc_feature 1..23: note = Description of Artificial Sequence: Synthetic oligonucleotide
  source 1..23: mol_type = other DNA
ttccgcagtatggatcggcagag

SEQ ID NO: 1254 - DNA, 23 bp, synthetic construct
  misc_feature 1..23: note = Description of Artificial Sequence: Synthetic oligonucleotide
  source 1..23: mol_type = other DNA
tccgcagtatggatcggcagagg

SEQ ID NO: 1255 - DNA, 23 bp, synthetic construct
  misc_feature 1..23: note = Description of Artificial Sequence: Synthetic oligonucleotide
  source 1..23: mol_type = other DNA
cgcagtatggatcggcagaggag

SEQ ID NO: 1256 - DNA, 23 bp, synthetic construct
  misc_feature 1..23: note = Description of Artificial Sequence: Synthetic oligonucleotide
  source 1..23: mol_type = other DNA
ggatcggcagaggagccgaaaag

SEQ ID NO: 1257 - DNA, 23 bp, synthetic construct
  misc_feature 1..23: note = Description of Artificial Sequence: Synthetic oligonucleotide
  source 1..23: mol_type = other DNA
gatcggcagaggagccgaaaagg

SEQ ID NO: 1258 - DNA, 23 bp, synthetic construct
  misc_feature 1..23: note = Description of Artificial Sequence: Synthetic oligonucleotide
  source 1..23: mol_type = other DNA
aggttccacgcacgcgctgatgg

SEQ ID NO: 1259 - DNA, 23 bp, synthetic construct
  misc_feature 1..23: note = Description of Artificial Sequence: Synthetic oligonucleotide
  source 1..23: mol_type = other DNA
cgcgctgatggcccatgaccaag

SEQ ID NO: 1260 - DNA, 23 bp, synthetic construct
  misc_feature 1..23: note = Description of Artificial Sequence: Synthetic oligonucleotide
  source 1..23: mol_type = other DNA
gatggcccatgaccaagccccag

SEQ ID NO: 1261 - DNA, 23 bp, synthetic construct
  misc_feature 1..23: note = Description of Artificial Sequence: Synthetic oligonucleotide
  source 1..23: mol_type = other DNA
gcccatgaccaagccccagccag

SEQ ID NO: 1262 - DNA, 23 bp, synthetic construct
  misc_feature 1..23: note = Description of Artificial Sequence: Synthetic oligonucleotide
  source 1..23: mol_type = other DNA
catgaccaagccccagccagtgg

SEQ ID NO: 1263 - DNA, 23 bp, synthetic construct
  misc_feature 1..23: note = Description of Artificial Sequence: Synthetic oligonucleotide
  source 1..23: mol_type = other DNA
atgaccaagccccagccagtggg

SEQ ID NO: 1264 - DNA, 23 bp, synthetic construct
  misc_feature 1..23: note = Description of Artificial Sequence: Synthetic oligonucleotide
  source 1..23: mol_type = other DNA
tgaccaagccccagccagtgggg

SEQ ID NO: 1265 - DNA, 23 bp, synthetic construct
  misc_feature 1..23: note = Description of Artificial Sequence: Synthetic oligonucleotide
  source 1..23: mol_type = other DNA
gaccaagccccagccagtggggg

SEQ ID NO: 1266 - DNA, 23 bp, synthetic construct
  misc_feature 1..23: note = Description of Artificial Sequence: Synthetic oligonucleotide
  source 1..23: mol_type = other DNA
ccagccagtgggggttgcgtcag

SEQ ID NO: 1267 - DNA, 23 bp, synthetic construct
  misc_feature 1..23: note = Description of Artificial Sequence: Synthetic oligonucleotide
  source 1..23: mol_type = other DNA
gggttgcgtcagcaaacacttgg

SEQ ID NO: 1268 - DNA, 23 bp, synthetic construct
  misc_feature 1..23: note = Description of Artificial Sequence: Synthetic oligonucleotide
  source 1..23: mol_type = other DNA
gcgtcagcaaacacttggcacag

SEQ ID NO: 1269 - DNA, 23 bp, synthetic construct
  misc_feature 1..23: note = Description of Artificial Sequence: Synthetic oligonucleotide
  source 1..23: mol_type = other DNA
gcaaacacttggcacagacctgg

SEQ ID NO: 1270 - DNA, 23 bp, synthetic construct
  misc_feature 1..23: note = Description of Artificial Sequence: Synthetic oligonucleotide
  source 1..23: mol_type = other DNA
ggcacagacctggccgttgccgg

SEQ ID NO: 1271 - DNA, 23 bp, synthetic construct
  misc_feature 1..23: note = Description of Artificial Sequence: Synthetic oligonucleotide
  source 1..23: mol_type = other DNA
gcacagacctggccgttgccggg

SEQ ID NO: 1272 - DNA, 23 bp, synthetic construct
  misc_feature 1..23: note = Description of Artificial Sequence: Synthetic oligonucleotide
  source 1..23: mol_type = other DNA
acctggccgttgccgggcaacgg

SEQ ID NO: 1273 - DNA, 23 bp, synthetic construct
  misc_feature 1..23: note = Description of Artificial Sequence: Synthetic oligonucleotide
  source 1..23: mol_type = other DNA
cctggccgttgccgggcaacggg

SEQ ID NO: 1274 - DNA, 23 bp, synthetic construct
  misc_feature 1..23: note = Description of Artificial Sequence: Synthetic oligonucleotide
  source 1..23: mol_type = other DNA
ctggccgttgccgggcaacgggg

SEQ ID NO: 1275 - DNA, 23 bp, synthetic construct
  misc_feature 1..23: note = Description of Artificial Sequence: Synthetic oligonucleotide
  source 1..23: mol_type = other DNA
cgttgccgggcaacggggtaaag

SEQ ID NO: 1276 - DNA, 23 bp, synthetic construct
  misc_feature 1..23: note = Description of Artificial Sequence: Synthetic oligonucleotide
  source 1..23: mol_type = other DNA
gttgccgggcaacggggtaaagg

SEQ ID NO: 1277 - DNA, 23 bp, synthetic construct
  misc_feature 1..23: note = Description of Artificial Sequence: Synthetic oligonucleotide
  source 1..23: mol_type = other DNA
cgggcaacggggtaaaggttcag

SEQ ID NO: 1278 - DNA, 23 bp, synthetic construct
  misc_feature 1..23: note = Description of Artificial Sequence: Synthetic oligonucleotide
  source 1..23: mol_type = other DNA
gggcaacggggtaaaggttcagg

SEQ ID NO: 1279 - DNA, 23 bp, synthetic construct
  misc_feature 1..23: note = Description of Artificial Sequence: Synthetic oligonucleotide
  source 1..23: mol_type = other DNA
aggttcaggtattgtttacacag

SEQ ID NO: 1280 - DNA, 23 bp, synthetic construct
  misc_feature 1..23: note = Description of Artificial Sequence: Synthetic oligonucleotide
  source 1..23: mol_type = other DNA
tcaggtattgtttacacagaaag

SEQ ID NO: 1281 - DNA, 23 bp, synthetic construct
  misc_feature 1..23: note = Description of Artificial Sequence: Synthetic oligonucleotide
  source 1..23: mol_type = other DNA
caggtattgtttacacagaaagg

SEQ ID NO: 1282 - DNA, 23 bp, synthetic construct
  misc_feature 1..23: note = Description of Artificial Sequence: Synthetic oligonucleotide
  source 1..23: mol_type = other DNA
tttacacagaaaggccttgtaag

SEQ ID NO: 1283 - DNA, 23 bp, synthetic construct
  misc_feature 1..23: note = Description of Artificial Sequence: Synthetic oligonucleotide
  source 1..23: mol_type = other DNA
cacagaaaggccttgtaagttgg

SEQ ID NO: 1284 - DNA, 23 bp, synthetic construct
  misc_feature 1..23: note = Description of Artificial Sequence: Synthetic oligonucleotide
  source 1..23: mol_type = other DNA
gaaaggccttgtaagttggcgag

SEQ ID NO: 1285 - DNA, 23 bp, synthetic construct
  misc_feature 1..23: note = Description of Artificial Sequence: Synthetic oligonucleotide
  source 1..23: mol_type = other DNA
ggccttgtaagttggcgagaaag

SEQ ID NO: 1286 - DNA, 23 bp, synthetic construct
  misc_feature 1..23: note = Description of Artificial Sequence: Synthetic oligonucleotide
  source 1..23: mol_type = other DNA
gtaagttggcgagaaagtgaaag

SEQ ID NO: 1287 - DNA, 23 bp, synthetic construct
  misc_feature 1..23: note = Description of Artificial Sequence: Synthetic oligonucleotide
  source 1..23: mol_type = other DNA
cgagaaagtgaaagcctgcttag

SEQ ID NO: 1288 - DNA, 23 bp, synthetic construct
  misc_feature 1..23: note = Description of Artificial Sequence: Synthetic oligonucleotide
  source 1..23: mol_type = other DNA
tagattgaatacatgcatacaag

SEQ ID NO: 1289 - DNA, 23 bp, synthetic construct
  misc_feature 1..23: note = Description of Artificial Sequence: Synthetic oligonucleotide
  source 1..23: mol_type = other DNA
agattgaatacatgcatacaagg

SEQ ID NO: 1290 - DNA, 23 bp, synthetic construct
  misc_feature 1..23: note = Description of Artificial Sequence: Synthetic oligonucleotide
  source 1..23: mol_type = other DNA
gattgaatacatgcatacaaggg

SEQ ID NO: 1291 - DNA, 23 bp, synthetic construct
  misc_feature 1..23: note = Description of Artificial Sequence: Synthetic oligonucleotide
  source 1..23: mol_type = other DNA
tgcatacaagggcattaacgcag

SEQ ID NO: 1292 - DNA, 23 bp, synthetic construct
  misc_feature 1..23: note = Description of Artificial Sequence: Synthetic oligonucleotide
  source 1..23: mol_type = other DNA
gcatacaagggcattaacgcagg

SEQ ID NO: 1293 - DNA, 23 bp, synthetic construct
  misc_feature 1..23: note = Description of Artificial Sequence: Synthetic oligonucleotide
  source 1..23: mol_type = other DNA
ggataaccacattgtgtaaatgg

SEQ ID NO: 1294 - DNA, 23 bp, synthetic construct
  misc_feature 1..23: note = Description of Artificial Sequence: Synthetic oligonucleotide
  source 1..23: mol_type = other DNA
gataaccacattgtgtaaatggg

SEQ ID NO: 1295 - DNA, 23 bp, synthetic construct
  misc_feature 1..23: note = Description of Artificial Sequence: Synthetic oligonucleotide
  source 1..23: mol_type = other DNA
ataaccacattgtgtaaatgggg

SEQ ID NO: 1296 - DNA, 23 bp, synthetic construct
  misc_feature 1..23: note = Description of Artificial Sequence: Synthetic oligonucleotide
  source 1..23: mol_type = other DNA
accacattgtgtaaatggggcag

SEQ ID NO: 1297 - DNA, 23 bp, synthetic construct
  misc_feature 1..23: note = Description of Artificial Sequence: Synthetic oligonucleotide
  source 1..23: mol_type = other DNA
aatggggcagcaaaacccaaaag

SEQ ID NO: 1298 - DNA, 23 bp, synthetic construct
  misc_feature 1..23: note = Description of Artificial Sequence: Synthetic oligonucleotide
  source 1..23: mol_type = other DNA
ttgacatactttccaatcaatag

SEQ ID NO: 1299 - DNA, 23 bp, synthetic construct
  misc_feature 1..23: note = Description of Artificial Sequence: Synthetic oligonucleotide
  source 1..23: mol_type = other DNA
tgacatactttccaatcaatagg

SEQ ID NO: 1300 - DNA, 23 bp, synthetic construct
  misc_feature 1..23: note = Description of Artificial Sequence: Synthetic oligonucleotide
  source 1..23: mol_type = other DNA
ccaatcaataggcctgttaatag

SEQ ID NO: 1301 - DNA, 23 bp, synthetic construct
  misc_feature 1..23: note = Description of Artificial Sequence: Synthetic oligonucleotide
  source 1..23: mol_type = other DNA
caatcaataggcctgttaatagg

SEQ ID NO: 1302 - DNA, 23 bp, synthetic construct
  misc_feature 1..23: note = Description of Artificial Sequence: Synthetic oligonucleotide
  source 1..23: mol_type = other DNA
tcaataggcctgttaataggaag

SEQ ID NO: 1303 - DNA, 23 bp, synthetic construct
  misc_feature 1..23: note = Description of Artificial Sequence: Synthetic oligonucleotide
  source 1..23: mol_type = other DNA
ttttgtatgatgtgttcttgtgg

SEQ ID NO: 1304 - DNA, 23 bp, synthetic construct
  misc_feature 1..23: note = Description of Artificial Sequence: Synthetic oligonucleotide
  source 1..23: mol_type = other DNA
gtatgatgtgttcttgtggcaag

SEQ ID NO: 1305 - DNA, 23 bp, synthetic construct
  misc_feature 1..23: note = Description of Artificial Sequence: Synthetic oligonucleotide
  source 1..23: mol_type = other DNA
tatgatgtgttcttgtggcaagg

SEQ ID NO: 1306 - DNA, 23 bp, synthetic construct
  misc_feature 1..23: note = Description of Artificial Sequence: Synthetic oligonucleotide
  source 1..23: mol_type = other DNA
atgacataacccataaaattcag

SEQ ID NO: 1307 - DNA, 23 bp, synthetic construct
  misc_feature 1..23: note = Description of Artificial Sequence: Synthetic oligonucleotide
  source 1..23: mol_type = other DNA
gacataacccataaaattcagag

SEQ ID NO: 1308 - DNA, 23 bp, synthetic construct
  misc_feature 1..23: note = Description of Artificial Sequence: Synthetic oligonucleotide
  source 1..23: mol_type = other DNA
cataacccataaaattcagagag

SEQ ID NO: 1309 - DNA, 23 bp, synthetic construct
  misc_feature 1..23: note = Description of Artificial Sequence: Synthetic oligonucleotide
  source 1..23: mol_type = other DNA
accccatctctttgttttgttag

SEQ ID NO: 1310 - DNA, 23 bp, synthetic construct
  misc_feature 1..23: note = Description of Artificial Sequence: Synthetic oligonucleotide
  source 1..23: mol_type = other DNA
ccccatctctttgttttgttagg

SEQ ID NO: 1311 - DNA, 23 bp, synthetic construct
  misc_feature 1..23: note = Description of Artificial Sequence: Synthetic oligonucleotide
  source 1..23: mol_type = other DNA
cccatctctttgttttgttaggg

SEQ ID NO: 1312 - DNA, 23 bp, synthetic construct
  misc_feature 1..23: note = Description of Artificial Sequence: Synthetic oligonucleotide
  source 1..23: mol_type = other DNA
agggtttaaatgtatacccaaag

SEQ ID NO: 1313 - DNA, 23 bp, synthetic construct
  misc_feature 1..23: note = Description of Artificial Sequence: Synthetic oligonucleotide
  source 1..23: mol_type = other DNA
aaatgtatacccaaagacaaaag

SEQ ID NO: 1314 - DNA, 23 bp, synthetic construct
  misc_feature 1..23: note = Description of Artificial Sequence: Synthetic oligonucleotide
  source 1..23: mol_type = other DNA
acccaaagacaaaagaaaattgg

SEQ ID NO: 1315 - DNA, 23 bp, synthetic construct
  misc_feature 1..23: note = Description of Artificial Sequence: Synthetic oligonucleotide
  source 1..23: mol_type = other DNA
agacaaaagaaaattggtaacag

SEQ ID NO: 1316 - DNA, 23 bp, synthetic construct
  misc_feature 1..23: note = Description of Artificial Sequence: Synthetic oligonucleotide
  source 1..23: mol_type = other DNA
caaaagaaaattggtaacagcgg

SEQ ID NO: 1317 - DNA, 23 bp, synthetic construct
  misc_feature 1..23: note = Description of Artificial Sequence: Synthetic oligonucleotide
  source 1..23: mol_type = other DNA
aaattggtaacagcggtaaaaag

SEQ ID NO: 1318 - DNA, 23 bp, synthetic construct
  misc_feature 1..23: note = Description of Artificial Sequence: Synthetic oligonucleotide
  source 1..23: mol_type = other DNA
aattggtaacagcggtaaaaagg

SEQ ID NO: 1319 - DNA, 23 bp, synthetic construct
  misc_feature 1..23: note = Description of Artificial Sequence: Synthetic oligonucleotide
  source 1..23: mol_type = other DNA
attggtaacagcggtaaaaaggg

SEQ ID NO: 1320 - DNA, 23 bp, synthetic construct
  misc_feature 1..23: note = Description of Artificial Sequence: Synthetic oligonucleotide
  source 1..23: mol_type = other DNA
acagcggtaaaaagggactcaag

SEQ ID NO: 1321 - DNA, 23 bp, synthetic construct
  misc_feature 1..23: note = Description of Artificial Sequence: Synthetic oligonucleotide
  source 1..23: mol_type = other DNA
aagggactcaagatgctgtacag

SEQ ID NO: 1322 - DNA, 23 bp, synthetic construct
  misc_feature 1..23: note = Description of Artificial Sequence: Synthetic oligonucleotide
  source 1..23: mol_type = other DNA
ctcaagatgctgtacagacttgg

SEQ ID NO: 1323 - DNA, 23 bp, synthetic construct
  misc_feature 1..23: note = Description of Artificial Sequence: Synthetic oligonucleotide
  source 1..23: mol_type = other DNA
cacatcatccatataactgaaag

SEQ ID NO: 1324 - DNA, 23 bp, synthetic construct
  misc_feature 1..23: note = Description of Artificial Sequence: Synthetic oligonucleotide
  source 1..23: mol_type = other DNA
ccatataactgaaagccaaacag

SEQ ID NO: 1325 - DNA, 23 bp, synthetic construct
  misc_feature 1..23: note = Description of Artificial Sequence: Synthetic oligonucleotide
  source 1..23: mol_type = other DNA
tataactgaaagccaaacagtgg

SEQ ID NO: 1326 - DNA, 23 bp, synthetic construct
  misc_feature 1..23: note = Description of Artificial Sequence: Synthetic oligonucleotide
  source 1..23: mol_type = other DNA
ataactgaaagccaaacagtggg

SEQ ID NO: 1327 - DNA, 23 bp, synthetic construct
  misc_feature 1..23: note = Description of Artificial Sequence: Synthetic oligonucleotide
  source 1..23: mol_type = other DNA
taactgaaagccaaacagtgggg

SEQ ID NO: 1328 - DNA, 23 bp, synthetic construct
  misc_feature 1..23: note = Description of Artificial Sequence: Synthetic oligonucleotide
  source 1..23: mol_type = other DNA
aactgaaagccaaacagtggggg

SEQ ID NO: 1329 - DNA, 23 bp, synthetic construct
  misc_feature 1..23: note = Description of Artificial Sequence: Synthetic oligonucleotide
  source 1..23: mol_type = other DNA
gaaagccaaacagtgggggaaag

SEQ ID NO: 1330 - DNA, 23 bp, synthetic construct
  misc_feature 1..23: note = Description of Artificial Sequence: Synthetic oligonucleotide
  source 1..23: mol_type = other DNA
cctacgaaccactgaacaaatgg

SEQ ID NO: 1331 - DNA, 23 bp, synthetic construct
  misc_feature 1..23: note = Description of Artificial Sequence: Synthetic oligonucleotide
  source 1..23: mol_type = other DNA
aaccactgaacaaatggcactag

SEQ ID NO: 1332 - DNA, 23 bp, synthetic construct
  misc_feature 1..23: note = Description of Artificial Sequence: Synthetic oligonucleotide
  source 1..23: mol_type = other DNA
acaaatggcactagtaaactgag

SEQ ID NO: 1333 - DNA, 23 bp, synthetic construct
  misc_feature 1..23: note = Description of Artificial Sequence: Synthetic oligonucleotide
  source 1..23: mol_type = other DNA
atggcactagtaaactgagccag

SEQ ID NO: 1334 - DNA, 23 bp, synthetic construct
  misc_feature 1..23: note = Description of Artificial Sequence: Synthetic oligonucleotide
  source 1..23: mol_type = other DNA
tggcactagtaaactgagccagg

SEQ ID NO: 1335 - DNA, 23 bp, synthetic construct
  misc_feature 1..23: note = Description of Artificial Sequence: Synthetic oligonucleotide
  source 1..23: mol_type = other DNA
gcactagtaaactgagccaggag

SEQ ID NO: 1336 - DNA, 23 bp, synthetic construct
  misc_feature 1..23: note = Description of Artificial Sequence: Synthetic oligonucleotide
  source 1..23: mol_type = other DNA
gtaaactgagccaggagaaacgg

SEQ ID NO: 1337 - DNA, 23 bp, synthetic construct
  misc_feature 1..23: note = Description of Artificial Sequence: Synthetic oligonucleotide
  source 1..23: mol_type = other DNA
taaactgagccaggagaaacggg

SEQ ID NO: 1338 - DNA, 23 bp, synthetic construct
  misc_feature 1..23: note = Description of Artificial Sequence: Synthetic oligonucleotide
  source 1..23: mol_type = other DNA
tgagccaggagaaacgggctgag

SEQ ID NO: 1339 - DNA, 23 bp, synthetic construct
  misc_feature 1..23: note = Description of Artificial Sequence: Synthetic oligonucleotide
  source 1..23: mol_type = other DNA
gagccaggagaaacgggctgagg

SEQ ID NO: 1340 - DNA, 23 bp, synthetic construct
  misc_feature 1..23: note = Description of Artificial Sequence: Synthetic oligonucleotide
  source 1..23: mol_type = other DNA
cgggctgaggcccactcccatag

SEQ ID NO: 1341 - DNA, 23 bp, synthetic construct
  misc_feature 1..23: note = Description of Artificial Sequence: Synthetic oligonucleotide
  source 1..23: mol_type = other DNA
gggctgaggcccactcccatagg

SEQ ID NO: 1342 - DNA, 23 bp, synthetic construct
  misc_feature 1..23: note = Description of Artificial Sequence: Synthetic oligonucleotide
  source 1..23: mol_type = other DNA
ctcccataggaattttccgaaag

SEQ ID NO: 1343 - DNA, 23 bp, synthetic construct
  misc_feature 1..23: note = Description of Artificial Sequence: Synthetic oligonucleotide
  source 1..23: mol_type = other DNA
ataggaattttccgaaagcccag

SEQ ID NO: 1344 - DNA, 23 bp, synthetic construct
  misc_feature 1..23: note = Description of Artificial Sequence: Synthetic oligonucleotide
  source 1..23: mol_type = other DNA
taggaattttccgaaagcccagg

SEQ ID NO: 1345 - DNA, 23 bp, synthetic construct
  misc_feature 1..23: note = Description of Artificial Sequence: Synthetic oligonucleotide
  source 1..23: mol_type = other DNA
tttccgaaagcccaggatgatgg

SEQ ID NO: 1346 - DNA, 23 bp, synthetic construct
  misc_feature 1..23: note = Description of Artificial Sequence: Synthetic oligonucleotide
  source 1..23: mol_type = other DNA
ttccgaaagcccaggatgatggg

SEQ ID NO: 1347 - DNA, 23 bp, synthetic construct
  misc_feature 1..23: note = Description of Artificial Sequence: Synthetic oligonucleotide
  source 1..23: mol_type = other DNA
gaaagcccaggatgatgggatgg

SEQ ID NO: 1348 - DNA, 23 bp, synthetic construct
  misc_feature 1..23: note = Description of Artificial Sequence: Synthetic oligonucleotide
  source 1..23: mol_type = other DNA
aaagcccaggatgatgggatggg

SEQ ID NO: 1349 - DNA, 23 bp, synthetic construct
  misc_feature 1..23: note = Description of Artificial Sequence: Synthetic oligonucleotide
  source 1..23: mol_type = other DNA
aggatgatgggatgggaatacag

SEQ ID NO: 1350 - DNA, 23 bp, synthetic construct
  misc_feature 1..23: note = Description of Artificial Sequence: Synthetic oligonucleotide
  source 1..23: mol_type = other DNA
ggatgatgggatgggaatacagg

SEQ ID NO: 1351 - DNA, 23 bp, synthetic construct
  misc_feature 1..23: note = Description of Artificial Sequence: Synthetic oligonucleotide
  source 1..23: mol_type = other DNA
acaggtgcaatttccgtccgaag

SEQ ID NO: 1352 - DNA, 23 bp, synthetic construct
  misc_feature 1..23: note = Description of Artificial Sequence: Synthetic oligonucleotide
  source 1..23: mol_type = other DNA
caggtgcaatttccgtccgaagg

SEQ ID NO: 1353 - DNA, 23 bp, synthetic construct
  misc_feature 1..23: note = Description of Artificial Sequence: Synthetic oligonucleotide
  source 1..23: mol_type = other DNA
gcaatttccgtccgaaggtttgg

SEQ ID NO: 1354 - DNA, 23 bp, synthetic construct
  misc_feature 1..23: note = Description of Artificial Sequence: Synthetic oligonucleotide
  source 1..23: mol_type = other DNA
ttccgtccgaaggtttggtacag

SEQ ID NO: 1355 - DNA, 23 bp, synthetic construct
  misc_feature 1..23: note = Description of Artificial Sequence: Synthetic oligonucleotide
  source 1..23: mol_type = other DNA
ccgaaggtttggtacagcaacag

SEQ ID NO: 1356 - DNA, 23 bp, synthetic construct
  misc_feature 1..23: note = Description of Artificial Sequence: Synthetic oligonucleotide
  source 1..23: mol_type = other DNA
cgaaggtttggtacagcaacagg

SEQ ID NO: 1357 - DNA, 23 bp, synthetic construct
  misc_feature 1..23: note = Description of Artificial Sequence: Synthetic oligonucleotide
  source 1..23: mol_type = other DNA
aaggtttggtacagcaacaggag

SEQ ID NO: 1358 - DNA, 23 bp, synthetic construct
  misc_feature 1..23: note = Description of Artificial Sequence: Synthetic oligonucleotide
  source 1..23: mol_type = other DNA
aggtttggtacagcaacaggagg

SEQ ID NO: 1359 - DNA, 23 bp, synthetic construct
  misc_feature 1..23: note = Description of Artificial Sequence: Synthetic oligonucleotide
  source 1..23: mol_type = other DNA
ggtttggtacagcaacaggaggg

SEQ ID NO: 1360 - DNA, 23 bp, synthetic construct
  misc_feature 1..23: note = Description of Artificial Sequence: Synthetic oligonucleotide
  source 1..23: mol_type = other DNA
acagcaacaggagggatacatag

SEQ ID NO: 1361 - DNA, 23 bp, synthetic construct
  misc_feature 1..23: note = Description of Artificial Sequence: Synthetic oligonucleotide
  source 1..23: mol_type = other DNA
agcaacaggagggatacatagag

SEQ ID NO: 1362 - DNA, 23 bp, synthetic construct
  misc_feature 1..23: note = Description of Artificial Sequence: Synthetic oligonucleotide
  source 1..23: mol_type = other DNA
gcaacaggagggatacatagagg

SEQ ID NO: 1363 - DNA, 23 bp, synthetic construct
  misc_feature 1..23: note = Description of Artificial Sequence: Synthetic oligonucleotide
  source 1..23: mol_type = other DNA
gggatacatagaggttccttgag

SEQ ID NO: 1364 - DNA, 23 bp, synthetic construct
  misc_feature 1..23: note = Description of Artificial Sequence: Synthetic oligonucleotide
  source 1..23: mol_type = other DNA
atacatagaggttccttgagcag

SEQ ID NO: 1365 - DNA, 23 bp, synthetic construct
  misc_feature 1..23: note = Description of Artificial Sequence: Synthetic oligonucleotide
  source 1..23: mol_type = other DNA
catagaggttccttgagcagtag

SEQ ID NO: 1366 - DNA, 23 bp, synthetic construct
  misc_feature 1..23: note = Description of Artificial Sequence: Synthetic oligonucleotide
  source 1..23: mol_type = other DNA
ttccttgagcagtagtcatgcag

SEQ ID NO: 1367 - DNA, 23 bp, synthetic construct
  misc_feature 1..23: note = Description of Artificial Sequence: Synthetic oligonucleotide
  source 1..23: mol_type = other DNA
tccttgagcagtagtcatgcagg

SEQ ID NO: 1368 - DNA, 23 bp, synthetic construct
  misc_feature 1..23: note = Description of Artificial Sequence: Synthetic oligonucleotide
  source 1..23: mol_type = other DNA
gagcagtagtcatgcaggttcgg

SEQ ID NO: 1369 - DNA, 23 bp, synthetic construct
  misc_feature 1..23: note = Description of Artificial Sequence: Synthetic oligonucleotide
  source 1..23: mol_type = other DNA
gtagtcatgcaggttcggcatgg

SEQ ID NO: 1370 - DNA, 23 bp, synthetic construct
  misc_feature 1..23: note = Description of Artificial Sequence: Synthetic oligonucleotide
  source 1..23: mol_type = other DNA
ggttcggcatggtcccgtgctgg

SEQ ID NO: 1371 - DNA, 23 bp, synthetic construct
  misc_feature 1..23: note = Description of Artificial Sequence: Synthetic oligonucleotide
  source 1..23: mol_type = other DNA
tcggcatggtcccgtgctggtgg

SEQ ID NO: 1372 - DNA, 23 bp, synthetic construct
  misc_feature 1..23: note = Description of Artificial Sequence: Synthetic oligonucleotide
  source 1..23: mol_type = other DNA
atggtcccgtgctggtggttgag

SEQ ID NO: 1373 - DNA, 23 bp, synthetic construct
  misc_feature 1..23: note = Description of Artificial Sequence: Synthetic oligonucleotide
  source 1..23: mol_type = other DNA
tggtcccgtgctggtggttgagg

SEQ ID NO: 1374 - DNA, 23 bp, synthetic construct
  misc_feature 1..23: note = Description of Artificial Sequence: Synthetic oligonucleotide
  source 1..23: mol_type = other DNA
gtgctggtggttgaggatcctgg

SEQ ID NO: 1375 - DNA, 23 bp, synthetic construct
  misc_feature 1..23: note = Description of Artificial Sequence: Synthetic oligonucleotide
  source 1..23: mol_type = other DNA
gtggttgaggatcctggaattag

SEQ ID NO: 1376 - DNA, 23 bp, synthetic construct
  misc_feature 1..23: note = Description of Artificial Sequence: Synthetic oligonucleotide
  source 1..23: mol_type = other DNA
ggttgaggatcctggaattagag

SEQ ID NO: 1377 - DNA, 23 bp, synthetic construct
  misc_feature 1..23: note = Description of Artificial Sequence: Synthetic oligonucleotide
  source 1..23: mol_type = other DNA
gttgaggatcctggaattagagg

SEQ ID NO: 1378 - DNA, 23 bp, synthetic construct
  misc_feature 1..23: note = Description of Artificial Sequence: Synthetic oligonucleotide
  source 1..23: mol_type = other DNA
tcctggaattagaggacaaacgg

SEQ ID NO: 1379 - DNA, 23 bp, synthetic construct
  misc_feature 1..23: note = Description of Artificial Sequence: Synthetic oligonucleotide
  source 1..23: mol_type = other DNA
cctggaattagaggacaaacggg

SEQ ID NO: 1380 - DNA, 23 bp, synthetic construct
  misc_feature 1..23: note = Description of Artificial Sequence: Synthetic oligonucleotide
  source 1..23: mol_type = other DNA
aaacgggcaacataccttgatag

SEQ ID NO: 1381 - DNA, 23 bp, synthetic construct
  misc_feature 1..23: note = Description of Artificial Sequence: Synthetic oligonucleotide
  source 1..23: mol_type = other DNA
ggcaacataccttgatagtccag

SEQ ID NO: 1382 - DNA, 23 bp, synthetic construct
  misc_feature 1..23: note = Description of Artificial Sequence: Synthetic oligonucleotide
  source 1..23: mol_type = other DNA
aacataccttgatagtccagaag

SEQ ID NO: 1383 - DNA, 23 bp, synthetic construct
  misc_feature 1..23: note = Description of Artificial Sequence: Synthetic oligonucleotide
  source 1..23: mol_type = other DNA
gatagtccagaagaaccaacaag

SEQ ID NO: 1384 - DNA, 23 bp, synthetic construct
  misc_feature 1..23: note = Description of Artificial Sequence: Synthetic oligonucleotide
  source 1..23: mol_type = other DNA
agtccagaagaaccaacaagaag

SEQ ID NO: 1385 - DNA, 23 bp, synthetic construct
  misc_feature 1..23: note = Description of Artificial Sequence: Synthetic oligonucleotide
  source 1..23: mol_type = other DNA
agaagaaccaacaagaagatgag

SEQ ID NO: 1386 - DNA, 23 bp, synthetic construct
  misc_feature 1..23: note = Description of Artificial Sequence: Synthetic oligonucleotide
  source 1..23: mol_type = other DNA
gaagaaccaacaagaagatgagg

SEQ ID NO: 1387 - DNA, 23 bp, synthetic construct
  misc_feature 1..23: note = Description of Artificial Sequence: Synthetic oligonucleotide
  source 1..23: mol_type = other DNA
accaacaagaagatgaggcatag

SEQ ID NO: 1388 - DNA, 23 bp, synthetic construct
  misc_feature 1..23: note = Description of Artificial Sequence: Synthetic oligonucleotide
  source 1..23: mol_type = other DNA
aacaagaagatgaggcatagcag

SEQ ID NO: 1389 - DNA, 23 bp, synthetic construct
  misc_feature 1..23: note = Description of Artificial Sequence: Synthetic oligonucleotide
  source 1..23: mol_type = other DNA
aagaagatgaggcatagcagcag

SEQ ID NO: 1390 - DNA, 23 bp, synthetic construct
  misc_feature 1..23: note = Description of Artificial Sequence: Synthetic oligonucleotide
  source 1..23: mol_type = other DNA
agaagatgaggcatagcagcagg

SEQ ID NO: 1391 - DNA, 23 bp, synthetic construct
  misc_feature 1..23: note = Description of Artificial Sequence: Synthetic oligonucleotide
  source 1..23: mol_type = other DNA
tgaggcatagcagcaggatgaag

SEQ ID NO: 1392 - DNA, 23 bp, synthetic construct
  misc_feature 1..23: note = Description of Artificial Sequence: Synthetic oligonucleotide
  source 1..23: mol_type = other DNA
aggcatagcagcaggatgaagag

SEQ ID NO: 1393 - DNA, 23 bp, synthetic construct
  misc_feature 1..23: note = Description of Artificial Sequence: Synthetic oligonucleotide
  source 1..23: mol_type = other DNA
ggcatagcagcaggatgaagagg

SEQ ID NO: 1394 - DNA, 23 bp, synthetic construct
  misc_feature 1..23: note = Description of Artificial Sequence: Synthetic oligonucleotide
  source 1..23: mol_type = other DNA
atagcagcaggatgaagaggaag

SEQ ID NO: 1395 - DNA, 23 bp, synthetic construct
  misc_feature 1..23: note = Description of Artificial Sequence: Synthetic oligonucleotide
  source 1..23: mol_type = other DNA
aggaagatgataaaacgccgcag

SEQ ID NO: 1396 - DNA, 23 bp, synthetic construct
  misc_feature 1..23: note = Description of Artificial Sequence: Synthetic oligonucleotide
  source 1..23: mol_type = other DNA
taaaacgccgcagacacatccag

SEQ ID NO: 1397 - DNA, 23 bp, synthetic construct
  misc_feature 1..23: note = Description of Artificial Sequence: Synthetic oligonucleotide
  source 1..23: mol_type = other DNA
cagacacatccagcgataaccag

SEQ ID NO: 1398 - DNA, 23 bp, synthetic construct
  misc_feature 1..23: note = Description of Artificial Sequence: Synthetic oligonucleotide
  source 1..23: mol_type = other DNA
agacacatccagcgataaccagg

SEQ ID NO: 1399 - DNA, 23 bp, synthetic construct
  misc_feature 1..23: note = Description of Artificial Sequence: Synthetic oligonucleotide
  source 1..23: mol_type = other DNA
catccagcgataaccaggacaag

SEQ ID NO: 1400 - DNA, 23 bp, synthetic construct
  misc_feature 1..23: note = Description of Artificial Sequence: Synthetic oligonucleotide
  source 1..23: mol_type = other DNA
cagcgataaccaggacaagttgg

SEQ ID NO: 1401 - DNA, 23 bp, synthetic construct
  misc_feature 1..23: note = Description of Artificial Sequence: Synthetic oligonucleotide
  source 1..23: mol_type = other DNA
gcgataaccaggacaagttggag

SEQ ID NO: 1402 - DNA, 23 bp, synthetic construct
  misc_feature 1..23: note = Description of Artificial Sequence: Synthetic oligonucleotide
  source 1..23: mol_type = other DNA
cgataaccaggacaagttggagg

SEQ ID NO: 1403 - DNA, 23 bp, synthetic construct
  misc_feature 1..23: note = Description of Artificial Sequence: Synthetic oligonucleotide
  source 1..23: mol_type = other DNA
aaccaggacaagttggaggacag

SEQ ID NO: 1404 - DNA, 23 bp, synthetic construct
  misc_feature 1..23: note = Description of Artificial Sequence: Synthetic oligonucleotide
  source 1..23: mol_type = other DNA
accaggacaagttggaggacagg

SEQ ID NO: 1405 - DNA, 23 bp, synthetic construct
  misc_feature 1..23: note = Description of Artificial Sequence: Synthetic oligonucleotide
  source 1..23: mol_type = other DNA
caggacaagttggaggacaggag

SEQ ID NO: 1406 - DNA, 23 bp, synthetic construct
  misc_feature 1..23: note = Description of Artificial Sequence: Synthetic oligonucleotide
  source 1..23: mol_type = other DNA
aggacaagttggaggacaggagg

SEQ ID NO: 1407 - DNA, 23 bp, synthetic construct
  misc_feature 1..23: note = Description of Artificial Sequence: Synthetic oligonucleotide
  source 1..23: mol_type = other DNA
caagttggaggacaggaggttgg

SEQ ID NO: 1408 - DNA, 23 bp, synthetic construct
  misc_feature 1..23: note = Description of Artificial Sequence: Synthetic oligonucleotide
  source 1..23: mol_type = other DNA
ttggaggacaggaggttggtgag

SEQ ID NO: 1409 - DNA, 23 bp, synthetic construct
  misc_feature 1..23: note = Description of Artificial Sequence: Synthetic oligonucleotide
  source 1..23: mol_type = other DNA
acaggaggttggtgagtgattgg

SEQ ID NO: 1410 - DNA, 23 bp, synthetic construct
  misc_feature 1..23: note = Description of Artificial Sequence: Synthetic oligonucleotide
  source 1..23: mol_type = other DNA
aggaggttggtgagtgattggag

SEQ ID NO: 1411 - DNA, 23 bp, synthetic construct
  misc_feature 1..23: note = Description of Artificial Sequence: Synthetic oligonucleotide
  source 1..23: mol_type = other DNA
ggaggttggtgagtgattggagg

SEQ ID NO: 1412 - DNA, 23 bp, synthetic construct
  misc_feature 1..23: note = Description of Artificial Sequence: Synthetic oligonucleotide
  source 1..23: mol_type = other DNA
gttggtgagtgattggaggttgg

SEQ ID NO: 1413 - DNA, 23 bp, synthetic construct
  misc_feature 1..23: note = Description of Artificial Sequence: Synthetic oligonucleotide
  source 1..23: mol_type = other DNA
ttggtgagtgattggaggttggg

SEQ ID NO: 1414 - DNA, 23 bp, synthetic construct
  misc_feature 1..23: note = Description of Artificial Sequence: Synthetic oligonucleotide
  source 1..23: mol_type = other DNA
tggtgagtgattggaggttgggg

SEQ ID NO: 1415 - DNA, 23 bp, synthetic construct
  misc_feature 1..23: note = Description of Artificial Sequence: Synthetic oligonucleotide
  source 1..23: mol_type = other DNA
aggttggggactgcgaattttgg

SEQ ID NO: 1416 - DNA, 23 bp, synthetic construct
  misc_feature 1..23: note = Description of Artificial Sequence: Synthetic oligonucleotide
  source 1..23: mol_type = other DNA
ggggactgcgaattttggccaag

SEQ ID NO: 1417 - DNA, 23 bp, synthetic construct
  misc_feature 1..23: note = Description of Artificial Sequence: Synthetic oligonucleotide
  source 1..23: mol_type = other DNA
cgaattttggccaagacacacgg

SEQ ID NO: 1418 - DNA, 23 bp, synthetic construct
  misc_feature 1..23: note = Description of Artificial Sequence: Synthetic oligonucleotide
  source 1..23: mol_type = other DNA
attttggccaagacacacggtag

SEQ ID NO: 1419 - DNA, 23 bp, synthetic construct
  misc_feature 1..23: note = Description of Artificial Sequence: Synthetic oligonucleotide
  source 1..23: mol_type = other DNA
agacacacggtagttccccctag

SEQ ID NO: 1420 - DNA, 23 bp, synthetic construct
  misc_feature 1..23: note = Description of Artificial Sequence: Synthetic oligonucleotide
  source 1..23: mol_type = other DNA
gtagttccccctagaaaattgag

SEQ ID NO: 1421 - DNA, 23 bp, synthetic construct
  misc_feature 1..23: note = Description of Artificial Sequence: Synthetic oligonucleotide
  source 1..23: mol_type = other DNA
agttccccctagaaaattgagag

SEQ ID NO: 1422 - DNA, 23 bp, synthetic construct
  misc_feature 1..23: note = Description of Artificial Sequence: Synthetic oligonucleotide
  source 1..23: mol_type = other DNA
tccccctagaaaattgagagaag

SEQ ID NO: 1423 - DNA, 23 bp, synthetic construct
  misc_feature 1..23: note = Description of Artificial Sequence: Synthetic oligonucleotide
  source 1..23: mol_type = other DNA
aattgagagaagtccaccacgag

SEQ ID NO: 1424 - DNA, 23 bp, synthetic construct
  misc_feature 1..23: note = Description of Artificial Sequence: Synthetic oligonucleotide
  source 1..23: mol_type = other DNA
agagaagtccaccacgagtctag

SEQ ID NO: 1425 - DNA, 23 bp, synthetic construct
  misc_feature 1..23: note = Description of Artificial Sequence: Synthetic oligonucleotide
  source 1..23: mol_type = other DNA
caccacgagtctagactctgcgg

SEQ ID NO: 1426 - DNA, 23 bp, synthetic construct
  misc_feature 1..23: note = Description of Artificial Sequence: Synthetic oligonucleotide
  source 1..23: mol_type = other DNA
tctagactctgcggtattgtgag

SEQ ID NO: 1427 - DNA, 23 bp, synthetic construct
  misc_feature 1..23: note = Description of Artificial Sequence: Synthetic oligonucleotide
  source 1..23: mol_type = other DNA
ctagactctgcggtattgtgagg

SEQ ID NO: 1428 - DNA, 23 bp, synthetic construct
  misc_feature 1..23: note = Description of Artificial Sequence: Synthetic oligonucleotide
  source 1..23: mol_type = other DNA
ttgtgaggattcttgtcaacaag

SEQ ID NO: 1429 - DNA, 23 bp, synthetic construct
  misc_feature 1..23: note = Description of Artificial Sequence: Synthetic oligonucleotide
  source 1..23: mol_type = other DNA
aaaaaccccgcctgtaacacgag

SEQ ID NO: 1430 - DNA, 23 bp, synthetic construct
  misc_feature 1..23: note = Description of Artificial Sequence: Synthetic oligonucleotide
  source 1..23: mol_type = other DNA
aaccccgcctgtaacacgagaag

SEQ ID NO: 1431 - DNA, 23 bp, synthetic construct
  misc_feature 1..23: note = Description of Artificial Sequence: Synthetic oligonucleotide
  source 1..23: mol_type = other DNA
accccgcctgtaacacgagaagg

SEQ ID NO: 1432 - DNA, 23 bp, synthetic construct
  misc_feature 1..23: note = Description of Artificial Sequence: Synthetic oligonucleotide
  source 1..23: mol_type = other DNA
ccccgcctgtaacacgagaaggg

SEQ ID NO: 1433 - DNA, 23 bp, synthetic construct
  misc_feature 1..23: note = Description of Artificial Sequence: Synthetic oligonucleotide
  source 1..23: mol_type = other DNA
cccgcctgtaacacgagaagggg

SEQ ID NO: 1434 - DNA, 23 bp, synthetic construct
  misc_feature 1..23: note = Description of Artificial Sequence: Synthetic oligonucleotide
  source 1..23: mol_type = other DNA
tgtaacacgagaaggggtcctag

SEQ ID NO: 1435 - DNA, 23 bp, synthetic construct
  misc_feature 1..23: note = Description of Artificial Sequence: Synthetic oligonucleotide
  source 1..23: mol_type = other DNA
gtaacacgagaaggggtcctagg

SEQ ID NO: 1436 - DNA, 23 bp, synthetic construct
  misc_feature 1..23: note = Description of Artificial Sequence: Synthetic oligonucleotide
  source 1..23: mol_type = other DNA
gatgtgatgttctccatgttcag

SEQ ID NO: 1437 - DNA, 23 bp, synthetic construct
  misc_feature 1..23: note = Description of Artificial Sequence: Synthetic oligonucleotide
  source 1..23: mol_type = other DNA
gatgttctccatgttcagcgcag

SEQ ID NO: 1438 - DNA, 23 bp, synthetic construct
  misc_feature 1..23: note = Description of Artificial Sequence: Synthetic oligonucleotide
  source 1..23: mol_type = other DNA
atgttctccatgttcagcgcagg

SEQ ID NO: 1439 - DNA, 23 bp, synthetic construct
  misc_feature 1..23: note = Description of Artificial Sequence: Synthetic oligonucleotide
  source 1..23: mol_type = other DNA
tgttctccatgttcagcgcaggg

SEQ ID NO: 1440 - DNA, 23 bp, synthetic construct
  misc_feature 1..23: note = Description of Artificial Sequence: Synthetic oligonucleotide
  source 1..23: mol_type = other DNA
gcgcagggtccccaatcctcgag

SEQ ID NO: 1441 - DNA, 23 bp, synthetic construct
  misc_feature 1..23: note = Description of Artificial Sequence: Synthetic oligonucleotide
  source 1..23: mol_type = other DNA
cagggtccccaatcctcgagaag

SEQ ID NO: 1442 - DNA, 23 bp, synthetic construct
  misc_feature 1..23: note = Description of Artificial Sequence: Synthetic oligonucleotide
  source 1..23: mol_type = other DNA
tcctcgagaagattgacgataag

SEQ ID NO: 1443 - DNA, 23 bp, synthetic construct
  misc_feature 1..23: note = Description of Artificial Sequence: Synthetic oligonucleotide
  source 1..23: mol_type = other DNA
cctcgagaagattgacgataagg

SEQ ID NO: 1444 - DNA, 23 bp, synthetic construct
  misc_feature 1..23: note = Description of Artificial Sequence: Synthetic oligonucleotide
  source 1..23: mol_type = other DNA
ctcgagaagattgacgataaggg

SEQ ID NO: 1445 - DNA, 23 bp, synthetic construct
  misc_feature 1..23: note = Description of Artificial Sequence: Synthetic oligonucleotide
  source 1..23: mol_type = other DNA
cgagaagattgacgataagggag

SEQ ID NO: 1446 - DNA, 23 bp, synthetic construct
  misc_feature 1..23: note = Description of Artificial Sequence: Synthetic oligonucleotide
  source 1..23: mol_type = other DNA
agaagattgacgataagggagag

SEQ ID NO: 1447 - DNA, 23 bp, synthetic construct
  misc_feature 1..23: note = Description of Artificial Sequence: Synthetic oligonucleotide
  source 1..23: mol_type = other DNA
gaagattgacgataagggagagg

SEQ ID NO: 1448 - DNA, 23 bp, synthetic construct
  misc_feature 1..23: note = Description of Artificial Sequence: Synthetic oligonucleotide
  source 1..23: mol_type = other DNA
gattgacgataagggagaggcag

SEQ ID NO: 1449 - DNA, 23 bp, synthetic construct
  misc_feature 1..23: note = Description of Artificial Sequence: Synthetic oligonucleotide
  source 1..23: mol_type = other DNA
tgacgataagggagaggcagtag

SEQ ID NO: 1450 - DNA, 23 bp, synthetic construct
  misc_feature 1..23: note = Description of Artificial Sequence: Synthetic oligonucleotide
  source 1..23: mol_type = other DNA
gataagggagaggcagtagtcgg

SEQ ID NO: 1451 - DNA, 23 bp, synthetic construct
  misc_feature 1..23: note = Description of Artificial Sequence: Synthetic oligonucleotide
  source 1..23: mol_type = other DNA
gggagaggcagtagtcggaacag

SEQ ID NO: 1452 - DNA, 23 bp, synthetic construct
  misc_feature 1..23: note = Description of Artificial Sequence: Synthetic oligonucleotide
  source 1..23: mol_type = other DNA
ggagaggcagtagtcggaacagg

SEQ ID NO: 1453 - DNA, 23 bp, synthetic construct
  misc_feature 1..23: note = Description of Artificial Sequence: Synthetic oligonucleotide
  source 1..23: mol_type = other DNA
gagaggcagtagtcggaacaggg

SEQ ID NO: 1454 - DNA, 23 bp, synthetic construct
  misc_feature 1..23: note = Description of Artificial Sequence: Synthetic oligonucleotide
  source 1..23: mol_type = other DNA
agggtttactgctcctgaactgg

SEQ ID NO: 1455 - DNA, 23 bp, synthetic construct
  misc_feature 1..23: note = Description of Artificial Sequence: Synthetic oligonucleotide
  source 1..23: mol_type = other DNA
ggtttactgctcctgaactggag

SEQ ID NO: 1456 - DNA, 23 bp, synthetic construct
  misc_feature 1..23: note = Description of Artificial Sequence: Synthetic oligonucleotide
  source 1..23: mol_type = other DNA
tgctcctgaactggagccaccag

SEQ ID NO: 1457 - DNA, 23 bp, synthetic construct
  misc_feature 1..23: note = Description of Artificial Sequence: Synthetic oligonucleotide
  source 1..23: mol_type = other DNA
tcctgaactggagccaccagcag

SEQ ID NO: 1458 - DNA, 23 bp, synthetic construct
  misc_feature 1..23: note = Description of Artificial Sequence: Synthetic oligonucleotide
  source 1..23: mol_type = other DNA
cctgaactggagccaccagcagg

SEQ ID NO: 1459 - DNA, 23 bp, synthetic construct
  misc_feature 1..23: note = Description of Artificial Sequence: Synthetic oligonucleotide
  source 1..23: mol_type = other DNA
ctgaactggagccaccagcaggg

SEQ ID NO: 1460 - DNA, 23 bp, synthetic construct
  misc_feature 1..23: note = Description of Artificial Sequence: Synthetic oligonucleotide
  source 1..23: mol_type = other DNA
gagccaccagcagggaaatacag

SEQ ID NO: 1461 - DNA, 23 bp, synthetic construct
  misc_feature 1..23: note = Description of Artificial Sequence: Synthetic oligonucleotide
  source 1..23: mol_type = other DNA
agccaccagcagggaaatacagg

SEQ ID NO: 1462 - DNA, 23 bp, synthetic construct
  misc_feature 1..23: note = Description of Artificial Sequence: Synthetic oligonucleotide
  source 1..23: mol_type = other DNA
gaaatacaggcctctcactctgg

SEQ ID NO: 1463 - DNA, 23 bp, synthetic construct
  misc_feature 1..23: note = Description of Artificial Sequence: Synthetic oligonucleotide
  source 1..23: mol_type = other DNA
aaatacaggcctctcactctggg

SEQ ID NO: 1464 - DNA, 23 bp, synthetic construct
  misc_feature 1..23: note = Description of Artificial Sequence: Synthetic oligonucleotide
  source 1..23: mol_type = other DNA
cctctcactctgggatcttgcag

SEQ ID NO: 1465 - DNA, 23 bp, synthetic construct
  misc_feature 1..23: note = Description of Artificial Sequence: Synthetic oligonucleotide
  source 1..23: mol_type = other DNA
tctcactctgggatcttgcagag

SEQ ID NO: 1466 - DNA, 23 bp, synthetic construct
  misc_feature 1..23: note = Description of Artificial Sequence: Synthetic oligonucleotide
  source 1..23: mol_type = other DNA
ctctgggatcttgcagagtttgg

SEQ ID NO: 1467 - DNA, 23 bp, synthetic construct
  misc_feature 1..23: note = Description of Artificial Sequence: Synthetic oligonucleotide
  source 1..23: mol_type = other DNA
gatcttgcagagtttggtgaaag

SEQ ID NO: 1468 - DNA, 23 bp, synthetic construct
  misc_feature 1..23: note = Description of Artificial Sequence: Synthetic oligonucleotide
  source 1..23: mol_type = other DNA
atcttgcagagtttggtgaaagg

SEQ ID NO: 1469 - DNA, 23 bp, synthetic construct
  misc_feature 1..23: note = Description of Artificial Sequence: Synthetic oligonucleotide
  source 1..23: mol_type = other DNA
cagagtttggtgaaaggttgtgg

SEQ ID NO: 1470 - DNA, 12 bp, synthetic construct
  misc_feature 1..12: note = Description of Artificial Sequence: Synthetic oligonucleotide
  source 1..12: mol_type = other DNA
gttttagagcta

SEQ ID NO: 1471 - DNA, 31 bp, synthetic construct
  misc_feature 1..31: note = Description of Artificial Sequence: Synthetic oligonucleotide
  source 1..31: mol_type = other DNA
tagcaagttaaaataaggctagtccgttttt

SEQ ID NO: 1472 - DNA, 19 bp, synthetic construct
  misc_feature 1..19: note = Description of Artificial Sequence: Synthetic oligonucleotide
  source 1..19: mol_type = other DNA
cctctgccgatccatactg

SEQ ID NO: 1473 - DNA, 33 bp, Homo sapiens
  source 1..33: mol_type = unassigned DNA
ggacatcgatgtcacctccaatgactagggtgg

SEQ ID NO: 1474 - DNA, 33 bp, Homo sapiens
  source 1..33: mol_type = unassigned DNA
cattggaggtgacatcgatgtcctccccattgg

SEQ ID NO: 1475 - DNA, 33 bp, Homo sapiens
  source 1..33: mol_type = unassigned DNA
ggaagggcctgagtccgagcagaagaagaaggg

SEQ ID NO: 1476 - DNA, 33 bp, Homo sapiens
  source 1..33: mol_type = unassigned DNA
ggtggcgagaggggccgagattgggtgttcagg

SEQ ID NO: 1477 - DNA, 33 bp, Homo sapiens
  source 1..33: mol_type = unassigned DNA
atgcaggagggtggcgagaggggccgagattgg

SEQ ID NO: 1478 - DNA, 32 bp, synthetic construct
  misc_feature 1..32: note = Description of Artificial Sequence: Synthetic primer
  source 1..32: mol_type = other DNA
aaactctagagagggcctatttcccatgattc

SEQ ID NO: 1479 - DNA, 153 bp, synthetic construct
  misc_feature 1..153: note = Description of Artificial Sequence: Synthetic primer
  source 1..153: mol_type = other DNA
acctctagaaaaaaagcaccgactcggtgccactttttcaagttgataacggactagccttattttaacttgctatgctgttttgtttccaaaacagcatagctctaaaacccctagtcattggaggtgacggtgtttcgtcctttccacaag

SEQ ID NO: 1480 - DNA, 52 bp, synthetic construct
  misc_feature 1..52: note = Description of Artificial Sequence: Synthetic primer
  source 1..52: mol_type = other DNA
taatacgactcactataggaagtgcgccaccatggccccaaagaagaagcgg

SEQ ID NO: 1481 - DNA, 60 bp, synthetic construct
  misc_feature 1..60: note = Description of Artificial Sequence: Synthetic primer
  source 1..60: mol_type = other DNA
ggttttttttttttttttttttttttttttttttcttactttttcttttttgcctggccg

SEQ ID NO: 1482 - protein, 984 aa, Campylobacter jejuni
MARILAFDIGISSIGWAFSENDELKDCGVRIFTKVENPKTGESLALPRRLARSARKRLARRKARLNHLKHLIANEFKLNYEDYQSFDESLAKAYKGSLISPYELRFRALNELLSKQDFARVILHIAKRRGYDDIKNSDDKEKGAILKAIKQNEEKLANYQSVGEYLYKEYFQKFKENSKEFTNVRNKKESYERCIAQSFLKDELKLIFKKQREFGFSFSKKFEEEVLSVAFYKRALKDFSHLVGNCSFFTDEKRAPKNSPLAFMFVALTRIINLLNNLKNTEGILYTKDDLNALLNEVLKNGTLTYKQTKKLLGLSDDYEFKGEKGTYFIEFKKYKEFIKALGEHNLSQDDLNEIAKDITLIKDEIKLKKALAKYDLNQNQIDSLSKLEFKDHLNISFKALKLVTPLMLEGKKYDEACNELNLKVAINEDKKDFLPAFNETYYKDEVTNPVVLRAIKEYRKVLNALLKKYGKVHKINIELAREVGKNHSQRAKIEKEQNENYKAKKDAELECEKLGLKINSKNILKLRLFKEQKEFCAYSGEKIKISDLQDEKMLEIDHIYPYSRSFDDSYMNKVLVFTKQNQEKLNQTPFEAFGNDSAKWQKIEVLAKNLPTKKQKRILDKNYKDKEQKNFKDRNLNDTRYIARLVLNYTKDYLDFLPLSDDENTKLNDTQKGSKVHVEAKSGMLTSALRHTWGFSAKDRNNHLHHAIDAVIIAYANNSIVKAFSDFKKEQESNSAELYAKKISELDYKNKRKFFEPFSGFRQKVLDKIDEIFVSKPERKKPSGALHEETFRKEEEFYQSYGGKEGVLKALELGKIRKVNGKIVKNGDMFRVDIFKHKKTNKFYAVPIYTMDFALKVLPNKAVARSKKGEIKDWILMDENYEFCFSLYKDSLILIQTKDMQEPEFVYYNAFTSSTVSLIVSKHDNKFETLSKNQKILFKNANEKEVIAKSIGIQNLKVFEKYIVSALGEVTKAEFRQREDFKK

SEQ ID NO: 1483 - DNA, 91 bp, synthetic construct
  misc_feature 1..91: note = Description of Artificial Sequence: Synthetic oligonucleotide
  source 1..91: mol_type = other DNA
tataatctcataagaaatttaaaaagggactaaaataaagagtttgcgggactctgcggggttacaatcccctaaaaccgcttttaaaatt

SEQ ID NO: 1484 - DNA, 36 bp, synthetic construct
  misc_feature 1..36: note = Description of Artificial Sequence: Synthetic oligonucleotide
  source 1..36: mol_type = other DNA
attttaccataaagaaatttaaaaagggactaaaac

SEQ ID NO: 1485 - RNA, 95 nt, synthetic construct
  misc_difference 1..20: note = a, c, u, g, unknown or other
  misc_feature 1..95: note = Description of Artificial Sequence: Synthetic oligonucleotide
  source 1..95: mol_type = other RNA
nnnnnnnnnnnnnnnnnnnngttttagtcccgaaagggactaaaataaagagtttgcgggactctgcggggttacaatcccctaaaaccgctttt

SEQ ID NO: 1486 - protein, 1115 aa, synthetic construct
  REGION 1..1115: note = Description of Artificial Sequence: Synthetic polypeptide
MSDLVLGLDIGIGSVGVGILNKVTGEIIHKNSRIFPAAQAENNLVRRTNRQGRRLARRKKHRRVRLNRLFEESGLITDFTKISINLNPYQLRVKGLTDELSNEELFIALKNMVKHRGISYLDDASDDGNSSVGDYAQIVKENSKQLETKTPGQIQLERYQTYGQLRGDFTVEKDGKKHRLINVFPTSAYRSEALRILQTQQEFNPQITDEFINRYLEILTGKRKYYHGPGNEKSRTDYGRYRTSGETLDNIFGILIGKCTFYPDEFRAAKASYTAQEFNLLNDLNNLTVPTETKKLSKEQKNQIINYVKNEKAMGPAKLFKYIAKLLSCDVADIKGYRIDKSGKAEIHTFEAYRKMKTLETLDIEQMDRETLDKLAYVLTLNTEREGIQEALEHEFADGSFSQKQVDELVQFRKANSSIFGKGWHNFSVKLMMELIPELYETSEEQMTILTRLGKQKTTSSSNKTKYIDEKLLTEEIYNPVVAKSVRQAIKIVNAAIKEYGDFDNIVIEMARENQTTQKGQKNSRERMKRIEEGIKELGSQILKEHPVENTQLQNEKLYLYYLQNGRDMYVDQELDINRLSDYDVDHIVPQSFLKDDSIDNKVLTRSDKNRGKSDNVPSEEVVKKMKNYWRQLLNAKLITQRKFDNLTKAERGGLSELDKAGFIKRQLVETRQITKHVAQILDSRMNTKYDENDKLIREVKVITLKSKLVSDFRKDFQFYKVREINNYHHAHDAYLNAVVGTALIKKYPKLESEFVYGDYKVYDVRKMIAKSEQEIGKATAKYFFYSNIMNFFKTEITLANGEIRKRPLIETNGETGEIVWDKGRDFATVRKVLSMPQVNIVKKTEVQTGGFSKESILPKRNSDKLIARKKDWDPKKYGGFDSPTVAYSVLVVAKVEKGKSKKLKSVKELLGITIMERSSFEKNPIDFLEAKGYKEVKKDLIIKLPKYSLFELENGRKRMLASAGELQKGNELALPSKYVNFLYLASHYEKLKGSPEDNEQKQLFVEQHKHYLDEIIEQISEFSKRVILADANLDKVLSAYNKHRDKPIREQAENIIHLFTLTNLGAPAAFKYFDTTIDRKRYTSTKEVLDATLIHQSITGLYETRIDLSQLGGD

SEQ ID NO: 1487 - protein, 1374 aa, synthetic construct
  REGION 1..1374: note = Description of Artificial Sequence: Synthetic polypeptide
MDKKYSIGLDIGTNSVGWAVITDEYKVPSKKFKVLGNTDRHSIKKNLIGALLFDSGETAEATRLKRTARRRYTRRKNRICYLQEIFSNEMAKVDDSFFHRLEESFLVEEDKKHERHPIFGNIVDEVAYHEKYPTIYHLRKKLVDSTDKADLRLIYLALAHMIKFRGHFLIEGDLNPDNSDVDKLFIQLVQTYNQLFEENPINASGVDAKAILSARLSKSRRLENLIAQLPGEKKNGLFGNLIALSLGLTPNFKSNFDLAEDAKLQLSKDTYDDDLDNLLAQIGDQYADLFLAAKNLSDAILLSDILRVNTEITKAPLSASMIKRYDEHHQDLTLLKALVRQQLPEKYKEIFFDQSKNGYAGYIDGGASQEEFYKFIKPILEKMDGTEELLVKLNREDLLRKQRTFDNGSIPHQIHLGELHAILRRQEDFYPFLKDNREKIEKILTFRIPYYVGPLARGNSRFAWMTRKSEETITPWNFEEVVDKGASAQSFIERMTNFDKNLPNEKVLPKHSLLYEYFTVYNELTKVKYVTEGMRKPAFLSGEQKKAIVDLLFKTNRKVTVKQLKEDYFKKIECFDSVEISGVEDRFNASLGTYHDLLKIIKDKDFLDNEENEDILEDIVLTLTLFEDREMIEERLKTYAHLFDDKVMKQLKRRRYTGWGRLSRKLINGIRDKQSGKTILDFLKSDGFANRNFMQLIHDDSLTFKEDIQKAQVSGQGDSLHEHIANLAGSPAIKKGILQTVKVVDELVKVMGRHKPENIVIEMARETNEDDEKKAIQKIQKANKDEKDAAMLKAANQYNGKAELPHSVFHGHKQLATKIRLWHQQGERCLYTGKTISIHDLINNSNQFEVDHILPLSITFDDSLANKVLVYATANQEKGQRTPYQALDSMDDAWSFRELKAFVRESKTLSNKKKEYLLTEEDISKFDVRKKFIERNLVDTRYASRVVLNALQEHFRAHKIDTKVSVVRGQFTSQLRRHWGIEKTRDTYHHHAVDALIIAASSQLNLWKKQKNTLVSYSEDQLLDIETGELISDDEYKESVFKAPYQHFVDTLKSKEFEDSILFSYQVDSKFNRKISDATIYATRQAKVGKDKADETYVLGKIKDIYTQDGYDAFMKIYKKDKSKFLMYRHDPQTFEKVIEPILENYPNKQINEKGKEVPCNPFLKYKEEHGYIRKYSKKGNGPEIKSLKYYDSKLGNHIDITPKDSNNKVVLQSVSPWRADVYFNKTTGKYEILGLKYADLQFEKGTGTYKISQEKYNDIKKKEGVDSDSEFKFTLYKNDLLLVKDTETKEQQLFRFLSRTMPKQKHYVELKPYDKQKFEGGEALIKVLGNVANSGQCKKGLGKSNISIYKVRTDVLGNQHIIKNEGDKPKLDF

SEQ ID NO: 1488 - protein, 6 aa, synthetic construct
  REGION 1..6: note = Description of Artificial Sequence: Synthetic 6xHis tag
HHHHHH

SEQ ID NO: 1489 - DNA, 23 bp, synthetic construct
  misc_feature 1..23: note = Description of Artificial Sequence: Synthetic oligonucleotide
  source 1..23: mol_type = other DNA
gccaaattggacgaccctcgcgg

SEQ ID NO: 1490 - DNA, 23 bp, synthetic construct
  misc_feature 1..23: note = Description of Artificial Sequence: Synthetic oligonucleotide
  source 1..23: mol_type = other DNA
cgaggagacccccgtttcggtgg

SEQ ID NO: 1491 - DNA, 23 bp, synthetic construct
  misc_feature 1..23: note = Description of Artificial Sequence: Synthetic oligonucleotide
  source 1..23: mol_type = other DNA
cccgccgccgccgtggctcgagg

SEQ ID NO: 1492 - DNA, 23 bp, synthetic construct
  misc_feature 1..23: note = Description of Artificial Sequence: Synthetic oligonucleotide
  source 1..23: mol_type = other DNA
tgagctctacgagatccacaagg

SEQ ID NO: 1493 - DNA, 23 bp, synthetic construct
  misc_feature 1..23: note = Description of Artificial Sequence: Synthetic oligonucleotide
  source 1..23: mol_type = other DNA
ctcaaaattcataccggttgtgg

SEQ ID NO: 1494 - DNA, 23 bp, synthetic construct
  misc_feature 1..23: note = Description of Artificial Sequence: Synthetic oligonucleotide
  source 1..23: mol_type = other DNA
cgttaaacaacaaccggacttgg

SEQ ID NO: 1495 - DNA, 23 bp, synthetic construct
  misc_feature 1..23: note = Description of Artificial Sequence: Synthetic oligonucleotide
  source 1..23: mol_type = other DNA
ttcaccccgcggcgctgaatggg

SEQ ID NO: 1496 - DNA, 23 bp, synthetic construct
  misc_feature 1..23: note = Description of Artificial Sequence: Synthetic oligonucleotide
  source 1..23: mol_type = other DNA
accactaccagtccgtccacagg

SEQ ID NO: 1497 - DNA, 20 bp, Homo sapiens
  source 1..20: mol_type = unassigned DNA
acccttgttagccacctccc

SEQ ID NO: 1498 - DNA, 20 bp, Homo sapiens
  source 1..20: mol_type = unassigned DNA
gaacgcagtgctcttcgaag

SEQ ID NO: 1499 - DNA, 20 bp, Homo sapiens
  source 1..20: mol_type = unassigned DNA
ctcacgccctgctccgtgta

SEQ ID NO: 1500 - DNA, 20 bp, Homo sapiens
  source 1..20: mol_type = unassigned DNA
ggcgacaactacttcctggt

SEQ ID NO: 1501 - DNA, 20 bp, Homo sapiens
  source 1..20: mol_type = unassigned DNA
ctcacgccctgctccgtgta

SEQ ID NO: 1502 - DNA, 20 bp, Homo sapiens
  source 1..20: mol_type = unassigned DNA
gggcgacaactacttcctgg

SEQ ID NO: 1503 - DNA, 20 bp, Homo sapiens
  source 1..20: mol_type = unassigned DNA
cctcttcagggccggggtgg

SEQ ID NO: 1504 - DNA, 20 bp, Homo sapiens
  source 1..20: mol_type = unassigned DNA
gaggacccaggtggaactgc

SEQ ID NO: 1505 - DNA, 20 bp, Homo sapiens
  source 1..20: mol_type = unassigned DNA
tcagctccaggcggtcctgg

SEQ ID NO: 1506 - DNA, 20 bp, Homo sapiens
  source 1..20: mol_type = unassigned DNA
agcagcagcagcagtggcag

SEQ ID NO: 1507 - DNA, 20 bp, Homo sapiens
  source 1..20: mol_type = unassigned DNA
tgggcaccgtcagctccagg

SEQ ID NO: 1508 - DNA, 20 bp, Homo sapiens
  source 1..20: mol_type = unassigned DNA
cagcagtggcagcggccacc

SEQ ID NO: 1509 - DNA, 20 bp, Homo sapiens
  source 1..20: mol_type = unassigned DNA
acctctcccctggccctcat

SEQ ID NO: 1510 - DNA, 20 bp, Homo sapiens
  source 1..20: mol_type = unassigned DNA
ccaggaccgcctggagctga

SEQ ID NO: 1511 - DNA, 20 bp, Homo sapiens
  source 1..20: mol_type = unassigned DNA
ccgtcagctccaggcggtcc

SEQ ID NO: 1512 - DNA, 20 bp, Homo sapiens
  source 1..20: mol_type = unassigned DNA
agcagcagcagcagtggcag

SEQ ID NO: 1513 - DNA, 20 bp, Homo sapiens
  source 1..20: mol_type = unassigned DNA
atgtgccaagcaaagcctca

SEQ ID NO: 1514 - DNA, 20 bp, Homo sapiens
  source 1..20: mol_type = unassigned DNA
ttcggtcatgcccgtggatg

SEQ ID NO: 1515 - DNA, 20 bp, Homo sapiens
  source 1..20: mol_type = unassigned DNA
gtcgttgaaattcatcgtac

SEQ ID NO: 1516 - DNA, 20 bp, Homo sapiens
  source 1..20: mol_type = unassigned DNA
accacctgtgaagagtttcc

SEQ ID NO: 1517 - DNA, 20 bp, Homo sapiens
  source 1..20: mol_type = unassigned DNA
cgtcgttgaaattcatcgta

SEQ ID NO: 1518 - DNA, 20 bp, Homo sapiens
  source 1..20: mol_type = unassigned DNA
accacctgtgaagagtttcc

SEQ ID NO: 1519 - DNA, 20 bp, Mus musculus
  source 1..20: mol_type = unassigned DNA
gaacgcagtgcttttcgagg

SEQ ID NO: 1520 - DNA, 20 bp, Mus musculus
  source 1..20: mol_type = unassigned DNA
acccttgttggccacctccc

SEQ ID NO: 1521 - DNA, 20 bp, Mus musculus
  source 1..20: mol_type = unassigned DNA
ggtgacaactactatctggt

SEQ ID NO: 1522 - DNA, 20 bp, Mus musculus
  source 1..20: mol_type = unassigned DNA
ctcacaccctgctccgtgta

SEQ ID NO: 1523 - DNA, 20 bp, Mus musculus
  source 1..20: mol_type = unassigned DNA
gggtgacaactactatctgg

SEQ ID NO: 1524 - DNA, 20 bp, Mus musculus
  source 1..20: mol_type = unassigned DNA
ctcacaccctgctccgtgta

SEQ ID NO: 1525 - DNA, 20 bp, Mus musculus
  source 1..20: mol_type = unassigned DNA
cgagaacgcagtgcttttcg

SEQ ID NO: 1526 - DNA, 20 bp, Mus musculus
  source 1..20: mol_type = unassigned DNA
acccttgttggccacctccc

SEQ ID NO: 1527 - DNA, 20 bp, Mus musculus
  source 1..20: mol_type = unassigned DNA
atgagccaagcaaatcctca

SEQ ID NO: 1528 - DNA, 20 bp, Mus musculus
  source 1..20: mol_type = unassigned DNA
ttccgtcatgcccgtggaca

SEQ ID NO: 1529 - DNA, 20 bp, Mus musculus
  source 1..20: mol_type = unassigned DNA
cttcgttgaaaaccattgta

SEQ ID NO: 1530 - DNA, 20 bp, Mus musculus
  source 1..20: mol_type = unassigned DNA
ccacctctgaagagtttcct

SEQ ID NO: 1531 - DNA, 20 bp, Mus musculus
  source 1..20: mol_type = unassigned DNA
cttcgttgaaaaccattgta

SEQ ID NO: 1532 - DNA, 20 bp, Mus musculus
  source 1..20: mol_type = unassigned DNA
accacctctgaagagtttcc

SEQ ID NO: 1533 - DNA, 20 bp, Mus musculus
  source 1..20: mol_type = unassigned DNA
cttccactcactctgcgatt

SEQ ID NO: 1534 - DNA, 20 bp, Mus musculus
  source 1..20: mol_type = unassigned DNA
accatgtctcagtgtcaagc

SEQ ID NO: 1535 - DNA, 20 bp, Mus musculus
  source 1..20: mol_type = unassigned DNA
ggcggcaacagcggcaacag

SEQ ID NO: 1536 - DNA, 20 bp, Mus musculus
  source 1..20: mol_type = unassigned DNA
actgctctgcgtggctgcgg

SEQ ID NO: 1537 - DNA, 20 bp, Mus musculus
  source 1..20: mol_type = unassigned DNA
ccgcagccacgcagagcagt

SEQ ID NO: 1538 - DNA, 20 bp, Mus musculus
  source 1..20: mol_type = unassigned DNA
gcacctctcctcgccccgat

SEQ ID NO: 1539 - DNA, 23 bp, synthetic construct
  misc_feature 1..23: note = Description of Artificial Sequence: Synthetic primer
  source 1..23: mol_type = other DNA
gagggcctatttcccatgattcc

SEQ ID NO: 1540 - DNA, 126 bp, synthetic construct
  misc_difference 84..102: note = a, c, t, g, unknown or other
  misc_feature 1..126: note = Description of Artificial Sequence: Synthetic primer
  source 1..126: mol_type = other DNA
aaaaaaagcaccgactcggtgccactttttcaagttgataacggactagccttattttaacttgctatttctagctctaaaacnnnnnnnnnnnnnnnnnnnccggtgtttcgtcctttccacaag

SEQ ID NO: 1541-1542 - skipped (2 entries)

SEQ ID NO: 1543 - DNA, 126 bp, synthetic construct
  misc_feature 1..126: note = Description of Artificial Sequence: Synthetic primer
  source 1..126: mol_type = other DNA
aaaaaaagcaccgactcggtgccactttttcaagttgataacggactagccttattttaacttgctatttctagctctaaaacccctagtcattggaggtgaccggtgtttcgtcctttccacaag

SEQ ID NO: 1544 - DNA, 24 bp, synthetic construct
  misc_feature 1..24: note = Description of Artificial Sequence: Synthetic primer
  source 1..24: mol_type = other DNA
caccgtcacctccaatgactaggg

SEQ ID NO: 1545 - DNA, 24 bp, synthetic construct
  misc_feature 1..24: note = Description of Artificial Sequence: Synthetic primer
  source 1..24: mol_type = other DNA
aaacccctagtcattggaggtgac

SEQ ID NO: 1546 - DNA, 192 bp, synthetic construct
  misc_feature 1..192: note = Description of Artificial Sequence: Synthetic primer
  source 1..192: mol_type = other DNA
cagaagaagaagggctcccatcacatcaaccggtggcgcattgccacgaagcaggccaatggggaggacatcgatgtcacctccaatgacaagcttgctagcggtgggcaaccacaaacccacgagggcagagtgctgcttgctgctggccaggcccctgcgtgggcccaagctggactctggccactccct

SEQ ID NO: 1547 - DNA, 192 bp, synthetic construct
  misc_feature 1..192: note = Description of Artificial Sequence: Synthetic primer
  source 1..192: mol_type = other DNA
agggagtggccagagtccagcttgggcccacgcaggggcctggccagcagcaagcagcactctgccctcgtgggtttgtggttgcccaccgctagcaagcttgtcattggaggtgacatcgatgtcctccccattggcctgcttcgtggcaatgcgccaccggttgatgtgatgggagcccttcttcttctg

SEQ ID NO: 1548 - DNA, 20 bp, synthetic construct
  misc_feature 1..20: note = Description of Artificial Sequence: Synthetic primer
  source 1..20: mol_type = other DNA
ccatccccttctgtgaatgt

SEQ ID NO: 1549 - DNA, 20 bp, synthetic construct
  misc_feature 1..20: note = Description of Artificial Sequence: Synthetic primer
  source 1..20: mol_type = other DNA
ggagattggagacacggaga

SEQ ID NO: 1550 - DNA, 20 bp, synthetic construct
  misc_feature 1..20: note = Description of Artificial Sequence: Synthetic primer
  source 1..20: mol_type = other DNA
ggctccctgggttcaaagta

SEQ ID NO: 1551 - DNA, 21 bp, synthetic construct
  misc_feature 1..21: note = Description of Artificial Sequence: Synthetic primer
  source 1..21: mol_type = other DNA
agaggggtctggatgtcgtaa

SEQ ID NO: 1552 - DNA, 24 bp, synthetic construct
  misc_feature 1..24: note = Description of Artificial Sequence: Synthetic primer
  source 1..24: mol_type = other DNA
cgccagggttttcccagtcacgac

SEQ ID NO: 1553 - DNA, 51 bp, synthetic construct
  misc_feature 1..51: note = Description of Artificial Sequence: Synthetic primer
  source 1..51: mol_type = other DNA
gagggtctcgtccttgcggccgcgctagcgagggcctatttcccatgattc

SEQ ID NO: 1554 - DNA, 133 bp, synthetic construct
  misc_difference 95..114: note = a, c, t, g, unknown or other
  misc_feature 1..133: note = Description of Artificial Sequence: Synthetic primer
  source 1..133: mol_type = other DNA
ctcggtctcggtaaaaaagcaccgactcggtgccactttttcaagttgataacggactagccttattttaacttgctatttctagctctaaaacnnnnnnnnnnnnnnnnnnnnggtgtttcgtcctttccac

SEQ ID NO: 1555 - DNA, 41 bp, synthetic construct
  misc_feature 1..41: note = Description of Artificial Sequence: Synthetic primer
  source 1..41: mol_type = other DNA
gagggtctctttaccggtgagggcctatttcccatgattcc

SEQ ID NO: 1556 - DNA, 133 bp, synthetic construct
  misc_difference 95..114: note = a, c, t, g, unknown or other
  misc_feature 1..133: note = Description of Artificial Sequence: Synthetic primer
  source 1..133: mol_type = other DNA
ctcggtctcctcaaaaaagcaccgactcggtgccactttttcaagttgataacggactagccttattttaacttgctatttctagctctaaaacnnnnnnnnnnnnnnnnnnnnggtgtttcgtcctttccac

SEQ ID NO: 1557 - DNA, 40 bp, synthetic construct
  misc_feature 1..40: note = Description of Artificial Sequence: Synthetic primer
  source 1..40: mol_type = other DNA
gagggtctctttgagctcgagggcctatttcccatgattc

SEQ ID NO: 1558 - DNA, 133 bp, synthetic construct
  misc_difference 96..115: note = a, c, t, g, unknown or other
  misc_feature 1..133: note = Description of Artificial Sequence: Synthetic primer
  source 1..133: mol_type = other DNA
ctcggtctcgcgtaaaaaagcaccgactcggtgccactttttcaagttgataacggactagccttattttaacttgctatttctagctctaaaacnnnnnnnnnnnnnnnnnnnnggtgtttcgtcctttcca

SEQ ID NO: 1559 - DNA, 27 bp, synthetic construct
  misc_feature 1..27: note = Description of Artificial Sequence: Synthetic primer
  source 1..27: mol_type = other DNA
gagggtctcttacgcgtgtgtctagac

SEQ ID NO: 1560 - DNA, 98 bp, synthetic construct
  misc_feature 1..98: note = Description of Artificial Sequence: Synthetic primer
  source 1..98: mol_type = other DNA
ctcggtctcaaggacagggaagggagcagtggttcacgcctgtaatcccagcaatttgggaggccaaggtgggtagatcacctgagattaggagttgc

SEQ ID NO: 1561 - DNA, 30 bp, synthetic construct
  misc_feature 1..30: note = Description of Artificial Sequence: Synthetic primer
  source 1..30: mol_type = other DNA
cctgtccttgcggccgcgctagcgagggcc

SEQ ID NO: 1562 - DNA, 31 bp, synthetic construct
  misc_feature 1..31: note = Description of Artificial Sequence: Synthetic primer
  source 1..31: mol_type = other DNA
cacgcggccgcaaggacagggaagggagcag

SEQ ID NO: 1563 - protein, 327 aa, synthetic construct
  REGION 1..327: note = Description of Artificial Sequence: Synthetic polypeptide
MVSKGEELFTGVVPILVELDGDVNGHKFSVSGEGEGDATYGKLTLKFICTTGKLPVPWPTLVTTLTYGVQCFSRYPDHMKQHDFFKSAMPEGYVQERTIFFKDDGNYKTRAEVKFEGDTLVNRIELKGIDFKEDGNILGHKLEYNYNSHNVYIMADKQKNGIKVNFKIRHNIEDGSVQLADHYQQNTPIGDGPVLLPDNHYLSTQSALSKDPNEKRDHMVLLEFVTAAGITLGMDELYKSGLRSREEEEETDSRMPHLDSPGSSQPRRSFLSRVIRAALPLQLLLLLLLLLACLLPASEDDYSCTQANNFARSFYPMLRYTNGPPPT

SEQ ID NO: 1564 - DNA, 3243 bp, synthetic construct
  misc_feature 1..3243: note = Description of Artificial Sequence: Synthetic polynucleotide
  source 1..3243: mol_type = other DNA
accggtgccaccatgtacccatacgatgttccagattacgcttcgccgaagaaaaagcgcaaggtcgaagcgtccatgaaaaggaactacattctggggctggacatcgggattacaagcgtggggtatgggattattgactatgaaacaagggacgtgatcgacgcaggcgtcagactgttcaaggaggccaacgtggaaaacaatgagggacggagaagcaagaggggagccaggcgcctgaaacgacggagaaggcacagaatccagagggtgaagaaactgctgttcgattacaacctgctgaccgaccattctgagctgagtggaattaatccttatgaagccagggtgaaaggcctgagtcagaagctgtcagaggaagagttttccgcagctctgctgcacctggctaagcgccgaggagtgcataacgtcaatgaggtggaagaggacaccggcaacgagctgtctacaaaggaacagatctcacgcaatagcaaagctctggaagagaagtatgtcgcagagctgcagctggaacggctgaagaaagatggcgaggtgagagggtcaattaataggttcaagacaagcgactacgtcaaagaagccaagcagctgctgaaagtgcagaaggcttaccaccagctggatcagagcttcatcgatacttatatcgacctgctggagactcggagaacctactatgagggaccaggagaagggagccccttcggatggaaagacatcaaggaatggtacgagatgctgatgggacattgcacctattttccagaagagctgagaagcgtcaagtacgcttataacgcagatctgtacaacgccctgaatgacctgaacaacctggtcatcaccagggatgaaaacgagaaactggaatactatgagaagttccagatcatcgaaaacgtgtttaagcagaagaaaaagcctacactgaaacagattgctaaggagatcctggtcaacgaagaggacatcaagggctaccgggtgacaagcactggaaaaccagagttcaccaatctgaaagtgtatcacgatattaaggacatcacagcacggaaagaaatcattgagaacgccgaactgctggatcagattgctaagatcctgactatctaccagagctccgaggacatccaggaagagctgactaacctgaacagcgagctgacccaggaagagatcgaacagattagtaatctgaaggggtacaccggaacacacaacctgtccctgaaagctatcaatctgattctggatgagctgtggcatacaaacgacaatcagattgcaatctttaaccggctgaagctggtcccaaaaaaggtggacctgagtcagcagaaagagatcccaaccacactggtggacgatttcattctgtcacccgtggtcaagcggagcttcatccagagcatcaaagtgatcaacgccatcatcaagaagtacggcctgcccaatgatatcattatcgagctggctagggagaagaacagcaaggacgcacagaagatgatcaatgagatgcagaaacgaaaccggcagaccaatgaacgcattgaagagattatccgaactaccgggaaagagaacgcaaagtacctgattgaaaaaatcaagctgcacgatatgcaggagggaaagtgtctgtattctctggaggccatccccctggaggacctgctgaacaatccattcaactacgaggtcgatcatattatccccagaagcgtgtccttcgacaattcctttaacaacaaggtgctggtcaagcaggaagagaactctaaaaagggcaataggactcctttccagtacctgtctagttcagattccaagatctcttacgaaacctttaaaaagcacattctgaatctggccaaaggaaagggccgcatcagcaagaccaaaaaggagtacctgctggaagagcgggacatcaacagattctccgtccagaaggattttattaaccggaatctggtggacacaagatacgctactcgcggcctgatgaatctgctgcgatcctatttccgggtgaacaatctggatgtgaaagtcaagtccatcaacggcgggttcacatcttttctgaggcgcaaatggaagtttaaaaaggagcgcaacaaagggtacaagcaccatgccgaagatgctctgattatcgcaaatgccgacttcatctttaaggagtggaaaaagctggacaaagccaagaaagtgatggagaaccagatgttcgaagagaagcaggccgaatctatgcccgaaatcgagacagaacaggagtacaaggagattttcatcactcctcaccagatcaagcatatcaaggatttcaaggactacaagtactctcaccgggtggataaaaagcccaacagagagctgatcaatgacaccctgtatagtacaagaaaagacgataaggggaataccctgattgtgaacaatctgaacggactgtacgacaaagataatgacaagctgaaaaagctgatcaacaaaagtcccgagaagctgctgatgtaccaccatgatcctcagacatatcagaaactgaagctgattatggagcagtacggcgacgagaagaacccactgtataagtactatgaagagactgggaactacctgaccaagtatagcaaaaaggataatggccccgtgatcaagaagatcaagtactatgggaacaagctgaatgcccatctggacatcacagacgattaccctaacagtcgcaacaaggtggtcaagctgtcactgaagccatacagattcgatgtctatctggacaacggcgtgtataaatttgtgactgtcaagaatctggatgtcatcaaaaaggagaactactatgaagtgaatagcaagtgctacgaagaggctaaaaagctgaaaaagattagcaaccaggcagagttcatcgcctccttttacaacaacgacctgattaagatcaatggcgaactgtatagggtcatcggggtgaacaatgatctgctgaaccgcattgaagtgaatatgattgacatcacttaccgagagtatctggaaaacatgaatgataagcgcccccctcgaattatcaaaacaattgcctctaagactcagagtatcaaaaagtactcaaccgacattctgggaaacctgtatgaggtgaagagcaaaaagcaccctcagattatcaaaaagggctaagaattc

SEQ ID NO: 1565 - DNA, 20 bp, synthetic construct
  misc_feature 1..20: note = Description of Artificial Sequence: Synthetic oligonucleotide
  source 1..20: mol_type = other DNA
ggggcgcacctctctttacg

SEQ ID NO: 1566 - DNA, 20 bp, synthetic construct
  misc_feature 1..20: note = Description of Artificial Sequence: Synthetic oligonucleotide
  source 1..20: mol_type = other DNA
taaagaatttggagctactg

SEQ ID NO: 1567 - DNA, 20 bp, synthetic construct
  misc_feature 1..20: note = Description of Artificial Sequence: Synthetic oligonucleotide
  source 1..20: mol_type = other DNA
tcctctgccgatccatactg

SEQ ID NO: 1568 - DNA, 17 bp, synthetic construct
  misc_feature 1..17: note = Description of Artificial Sequence: Synthetic primer
  source 1..17: mol_type = other DNA
tgcacttcgcttcacct

SEQ ID NO: 1569 - DNA, 17 bp, synthetic construct
  misc_feature 1..17: note = Description of Artificial Sequence: Synthetic primer
  source 1..17: mol_type = other DNA
aggggcatttggtggtc

SEQ ID NO: 1570 - DNA, 21 bp, synthetic construct
  misc_feature 1..21: note = Description of Artificial Sequence: Synthetic primer
  source 1..21: mol_type = other DNA
ccgtctgtgccttctcatctg

SEQ ID NO: 1571 - DNA, 29 bp, synthetic construct
  misc_feature 1..29: note = Description of Artificial Sequence: Synthetic primer
  source 1..29: mol_type = other DNA
agtccaagagtcctcttatgtaagacctt

SEQ ID NO: 1572 - DNA, 17 bp, synthetic construct
  misc_feature 1..17: note = Description of Artificial Sequence: Synthetic probe
  misc_feature 1: note = Nucleotide attached to 5' Fluorescein-ccgtgtgca ZEN quencher
  misc_feature 17: note = 3' Iowa Black FQ quencher
  source 1..17: mol_type = other DNA
cttcgcttcacctctgc

SEQ ID NO: 1573 - DNA, 20 bp, synthetic construct
  misc_feature 1..20: note = Description of Artificial Sequence: Synthetic primer
  source 1..20: mol_type = other DNA
tatccatggctgctaggctg

SEQ ID NO: 1574 - DNA, 22 bp, synthetic construct
  misc_feature 1..22: note = Description of Artificial Sequence: Synthetic primer
  source 1..22: mol_type = other DNA
agtcagaaggcaaaaacgagag

SEQ ID NO: 1575 - DNA, 20 bp, synthetic construct
  misc_feature 1..20: note = Description of Artificial Sequence: Synthetic primer
  source 1..20: mol_type = other DNA
aaattggtctgcgcaccagc

SEQ ID NO: 1576 - DNA, 24 bp, synthetic construct
  misc_feature 1..24: note = Description of Artificial Sequence: Synthetic primer
  source 1..24: mol_type = other DNA
aggtctctagatgctggatcttcc

SEQ ID NO: 1577 - DNA, 21 bp, synthetic construct
  misc_feature 1..21: note = Description of Artificial Sequence: Synthetic primer
  source 1..21: mol_type = other DNA
ggttatcctgcgttaatgccc

SEQ ID NO: 1578 - DNA, 19 bp, synthetic construct
  misc_feature 1..19: note = Description of Artificial Sequence: Synthetic primer
  source 1..19: mol_type = other DNA
gtccgcgtaaagagaggtg

SEQ ID NO: 1579 - DNA, 21 bp, synthetic construct
  misc_feature 1..21: note = Description of Artificial Sequence: Synthetic primer
  source 1..21: mol_type = other DNA
tgaacctttaccccgttgccc

SEQ ID NO: 1580 - DNA, 20 bp, synthetic construct
  misc_feature 1..20: note = Description of Artificial Sequence: Synthetic primer
  source 1..20: mol_type = other DNA
agagagtcccaagcgacccc

SEQ ID NO: 1581 - DNA, 102 bp, synthetic construct
  misc_feature 1..102: note = Description of Artificial Sequence: Synthetic polynucleotide
  source 1..102: mol_type = other DNA
gttttagagctatgctgttttgaatggtcccaaaacggaagggcctgagtccgagcagaagaagaagttttagagctatgctgttttgaatggtcccaaaac

SEQ ID NO: 1582 - DNA, 100 bp, Homo sapiens
  source 1..100: mol_type = unassigned DNA
cggaggacaaagtacaaacggcagaagctggaggaggaagggcctgagtccgagcagaagaagaagggctcccatcacatcaaccggtggcgcattgcca

SEQ ID NO: 1583 - DNA, 50 bp, synthetic construct
  misc_feature 1..50: note = Description of Artificial Sequence: Synthetic oligonucleotide
  source 1..50: mol_type = other DNA
agctggaggaggaagggcctgagtccgagcagaagaagaagggctcccac

SEQ ID NO: 1584 - RNA, 30 nt, synthetic construct
  misc_feature 1..30: note = Description of Artificial Sequence: Synthetic oligonucleotide
  source 1..30: mol_type = other RNA
gagtccgagcagaagaagaagttttagagc

SEQ ID NO: 1585 - DNA, 49 bp, synthetic construct
  misc_feature 1..49: note = Description of Artificial Sequence: Synthetic oligonucleotide
  source 1..49: mol_type = other DNA
agctggaggaggaagggcctgagtccgagcagaagagaagggctcccat

SEQ ID NO: 1586 - DNA, 53 bp, Homo sapiens
  source 1..53: mol_type = unassigned DNA
ctggaggaggaagggcctgagtccgagcagaagaagaagggctcccatcacat

SEQ ID NO: 1587 - DNA, 52 bp, Homo sapiens
  source 1..52: mol_type = unassigned DNA
ctggaggaggaagggcctgagtccgagcagaagagaagggctcccatcacat

SEQ ID NO: 1588 - DNA, 54 bp, Homo sapiens
  source 1..54: mol_type = unassigned DNA
ctggaggaggaagggcctgagtccgagcagaagaaagaagggctcccatcacat

SEQ ID NO: 1589 - DNA, 50 bp, Homo sapiens
  source 1..50: mol_type = unassigned DNA
ctggaggaggaagggcctgagtccgagcagaagaagggctcccatcacat

SEQ ID NO: 1590 - DNA, 47 bp, Homo sapiens
  source 1..47: mol_type = unassigned DNA
ctggaggaggaagggcctgagcccgagcagaagggctcccatcacat

SEQ ID NO: 1591 - DNA, 48 bp, Homo sapiens
  source 1..48: mol_type = unassigned DNA
ctggaggaggaagggcctgagtccgagcagaagaagaagggctcccat

SEQ ID NO: 1592 - RNA, 20 nt, synthetic construct
  misc_feature 1..20: note = Description of Artificial Sequence: Synthetic oligonucleotide
  source 1..20: mol_type = other RNA
gagtccgagcagaagaagat

SEQ ID NO: 1593 - RNA, 20 nt, synthetic construct
  misc_feature 1..20: note = Description of Artificial Sequence: Synthetic oligonucleotide
  source 1..20: mol_type = other RNA
gagtccgagcagaagaagta

SEQ ID NO: 1594 - RNA, 20 nt, synthetic construct
  misc_feature 1..20: note = Description of Artificial Sequence: Synthetic oligonucleotide
  source 1..20: mol_type = other RNA
gagtccgagcagaagaacaa

SEQ ID NO: 1595 - RNA, 20 nt, synthetic construct
  misc_feature 1..20: note = Description of Artificial Sequence: Synthetic oligonucleotide
  source 1..20: mol_type = other RNA
gagtccgagcagaagatgaa

SEQ ID NO: 1596 - RNA, 20 nt, synthetic construct
  misc_feature 1..20: note = Description of Artificial Sequence: Synthetic oligonucleotide
  source 1..20: mol_type = other RNA
gagtccgagcagaagtagaa

SEQ ID NO: 1597 - RNA, 20 nt, synthetic construct
  misc_feature 1..20: note = Description of Artificial Sequence: Synthetic oligonucleotide
  source 1..20: mol_type = other RNA
gagtccgagcagatgaagaa

SEQ ID NO: 1598 - RNA, 20 nt, synthetic construct
  misc_feature 1..20: note = Description of Artificial Sequence: Synthetic oligonucleotide
  source 1..20: mol_type = other RNA
gagtccgagcacaagaagaa

SEQ ID NO: 1599 - RNA, 20 nt, synthetic construct
  misc_feature 1..20: note = Description of Artificial Sequence: Synthetic oligonucleotide
  source 1..20: mol_type = other RNA
gagtccgaggagaagaagaa

SEQ ID NO: 1600 - RNA, 20 nt, synthetic construct
  misc_feature 1..20: note = Description of Artificial Sequence: Synthetic oligonucleotide
  source 1..20: mol_type = other RNA
gagtccgtgcagaagaagaa

SEQ ID NO: 1601 - RNA, 20 nt, synthetic construct
  misc_feature 1..20: note = Description of Artificial Sequence: Synthetic oligonucleotide
  source 1..20: mol_type = other RNA
gagtcggagcagaagaagaa

SEQ ID NO: 1602 - DNA, 20 bp, synthetic construct
  misc_feature 1..20: note = Description of Artificial Sequence: Synthetic oligonucleotide
  source 1..20: mol_type = other DNA
gagaccgagcagaagaagaa

SEQ ID NO: 1603 - DNA, 24 bp, synthetic construct
  misc_feature 1..24: note = Description of Artificial Sequence: Synthetic oligonucleotide
  source 1..24: mol_type = other DNA
aatgacaagcttgctagcggtggg

SEQ ID NO: 1604 - DNA, 39 bp, synthetic construct
  misc_feature 1..39: note = Description of Artificial Sequence: Synthetic oligonucleotide
  source 1..39: mol_type = other DNA
aaaacggaagggcctgagtccgagcagaagaagaagttt

SEQ ID NO: 1605 - DNA, 39 bp, synthetic construct
  misc_feature 1..39: note = Description of Artificial Sequence: Synthetic oligonucleotide
  source 1..39: mol_type = other DNA
aaacaggggccgagattgggtgttcagggcagaggtttt

SEQ ID NO: 1606 - DNA, 38 bp, synthetic construct
  misc_feature 1..38: note = Description of Artificial Sequence: Synthetic oligonucleotide
  source 1..38: mol_type = other DNA
aaaacggaagggcctgagtccgagcagaagaagaagtt

SEQ ID NO: 1607 - DNA, 40 bp, synthetic construct
  misc_feature 1..40: note = Description of Artificial Sequence: Synthetic oligonucleotide
  source 1..40: mol_type = other DNA
aacggagggaggggcacagatgagaaactcagggttttag

SEQ ID NO: 1608 - DNA, 38 bp, Homo sapiens
  source 1..38: mol_type = unassigned DNA
agcccttcttcttctgctcggactcaggcccttcctcc

SEQ ID NO: 1609 - DNA, 40 bp, Homo sapiens
  source 1..40: mol_type = unassigned DNA
cagggagggaggggcacagatgagaaactcaggaggcccc

SEQ ID NO: 1610 - DNA, 80 bp, synthetic construct
  misc_feature 1..80: note = Description of Artificial Sequence: Synthetic oligonucleotide
  source 1..80: mol_type = other DNA
ggcaatgcgccaccggttgatgtgatgggagcccttctaggaggcccccagagcagccactggggcctcaacactcaggc

SEQ ID NO: 1611 - DNA, 33 bp, Homo sapiens; identical to SEQ ID NO: 1475
  source 1..33: mol_type = unassigned DNA

SEQ ID NO: 1612 - DNA, 33 bp, Homo sapiens; identical to SEQ ID NO: 1474
  source 1..33: mol_type = unassigned DNA

SEQ ID NO: 1613 - DNA, 33 bp, Homo sapiens; identical to SEQ ID NO: 1473
  source 1..33: mol_type = unassigned DNA

SEQ ID NO: 1614 - DNA, 33 bp, Homo sapiens
  source 1..33: mol_type = unassigned DNA
catcgatgtcctccccattggcctgcttcgtgg

SEQ ID NO: 1615 - DNA, 33 bp, Homo sapiens
  source 1..33: mol_type = unassigned DNA
ttcgtggcaatgcgccaccggttgatgtgatgg

SEQ ID NO: 1616 - DNA, 33 bp, Homo sapiens
  source 1..33: mol_type = unassigned DNA
tcgtggcaatgcgccaccggttgatgtgatggg

SEQ ID NO: 1617 - DNA, 33 bp, Homo sapiens
  source 1..33: mol_type = unassigned DNA
tccagcttctgccgtttgtactttgtcctccgg

SEQ ID NO: 1618 - DNA, 33 bp, Homo sapiens
  source 1..33: mol_type = unassigned DNA
ggagggaggggcacagatgagaaactcaggagg

SEQ ID NO: 1619 - DNA, 33 bp, Homo sapiens
  source 1..33: mol_type = unassigned DNA
aggggccgagattgggtgttcagggcagagagg

SEQ ID NO: 1620 - DNA, 33 bp, Homo sapiens; identical to SEQ ID NO: 1477
  source 1..33: mol_type = unassigned DNA

SEQ ID NO: 1621 - DNA, 33 bp, Homo sapiens; identical to SEQ ID NO: 1476
  source 1..33: mol_type = unassigned DNA

SEQ ID NO: 1622 - DNA, 33 bp, Mus musculus
  source 1..33: mol_type = unassigned DNA
caagcactgagtgccattagctaaatgcatagg

SEQ ID NO: 1623 - DNA, 33 bp, Mus musculus
  source 1..33: mol_type = unassigned DNA
aatgcatagggtaccacccacaggtgccagggg

SEQ ID NO: 1624 - DNA, 33 bp, Mus musculus
  source 1..33: mol_type = unassigned DNA
acacacatgggaaagcctctgggccaggaaagg

SEQ ID NO: 1625 - DNA, 37 bp, Homo sapiens
  source 1..37: mol_type = unassigned DNA
ggaggaggtagtatacagaaacacagagaagtagaat

SEQ ID NO: 1626 - DNA, 37 bp, Homo sapiens
  source 1..37: mol_type = unassigned DNA
agaatgtagaggagtcacagaaactcagcactagaaa

SEQ ID NO: 1627 - DNA, 98 bp, synthetic construct
  misc_feature 1..98: note = Description of Artificial Sequence: Synthetic oligonucleotide
  source 1..98: mol_type = other DNA
ggacgaaacaccggaaccattcaaaacagcatagcaagttaaaataaggctagtccgttatcaacttgaaaaagtggcaccgagtcggtgcttttttt

SEQ ID NO: 1628 - DNA, 186 bp, synthetic construct
  misc_feature 1..186: note = Description of Artificial Sequence: Synthetic polynucleotide
  source 1..186: mol_type = other DNA
ggacgaaacaccggtagtattaagtattgttttatggctgataaatttctttgaatttctccttgattatttgttataaaagttataaaataatcttgttggaaccattcaaaacagcatagcaagttaaaataaggctagtccgttatcaacttgaaaaagtggcaccgagtcggtgcttttttt

SEQ ID NO: 1629 - DNA, 95 bp, synthetic construct
  misc_feature 1..95: note = Description of Artificial Sequence: Synthetic oligonucleotide
  source 1..95: mol_type = other DNA
gggttttagagctatgctgttttgaatggtcccaaaacgggtcttcgagaagacgttttagagctatgctgttttgaatggtcccaaaacttttt

SEQ ID NO: 1630-1631 - skipped (2 entries)

SEQ ID NO: 1632 - DNA, 84 bp, synthetic construct
  misc_feature 1..84: note = Description of Artificial Sequence: Synthetic oligonucleotide
  source 1..84: mol_type = other DNA
gtggaaaggacgaaacaccgggtcttcgagaagacctgttttagagctagaaatagcaagttaaaataaggctagtccgttttt

SEQ ID NO: 1633 - RNA, 46 nt, synthetic construct
  misc_difference 1..19: note = a, c, u, g, unknown or other
  misc_feature 1..46: note = Description of Artificial Sequence: Synthetic oligonucleotide
  source 1..46: mol_type = other RNA
nnnnnnnnnnnnnnnnnnngttattgtactctcaagatttattttt

SEQ ID NO: 1634 - RNA, 91 nt, synthetic construct
  misc_feature 1..91: note = Description of Artificial Sequence: Synthetic oligonucleotide
  source 1..91: mol_type = other RNA
gttacttaaatcttgcagaagctacaaagataaggcttcatgccgaaatcaacaccctgtcattttatggcagggtgttttcgttatttaa

SEQ ID NO: 1635 - DNA, 70 bp, Homo sapiens
  source 1..70: mol_type = unassigned DNA
ttttctagtgctgagtttctgtgactcctctacattctacttctctgtgtttctgtatactacctcctcc

SEQ ID NO: 1636 - DNA, 122 bp, Homo sapiens
  source 1..122: mol_type = unassigned DNA
ggaggaagggcctgagtccgagcagaagaagaagggctcccatcacatcaaccggtggcgcattgccacgaagcaggccaatggggaggacatcgatgtcacctccaatgactagggtgggc

SEQ ID NO: 1637 - RNA, 48 nt, synthetic construct
  misc_difference 3..32: note = a, c, u, g, unknown or other
  misc_feature 1..48: note = Description of Artificial Sequence: Synthetic oligonucleotide
  source 1..48: mol_type = other RNA
acnnnnnnnnnnnnnnnnnnnnnnnnnnnnnngttttagagctatgct

SEQ ID NO: 1638 - DNA, 67 bp, synthetic construct
  misc_feature 1..67: note = Description of Artificial Sequence: Synthetic oligonucleotide
  source 1..67: mol_type = other DNA
  misc_feature 1..4: note = DNA
  misc_feature 5: note = RNA
  misc_feature 6..11: note = DNA
  misc_feature 12..13: note = RNA
  misc_feature 14..17: note = DNA
  misc_feature 18: note = RNA
  misc_feature 19..26: note = DNA
  misc_feature 27: note = RNA
  misc_feature 28..30: note = DNA
  misc_feature 31..32: note = RNA
  misc_feature 33: note = DNA
  misc_feature 34: note = RNA
  misc_feature 35..38: note = DNA
  misc_feature 39..40: note = RNA
  misc_feature 41..47: note = DNA
  misc_feature 48: note = RNA
  misc_feature 49..57: note = DNA
  misc_feature 58: note = RNA
  misc_feature 59..61: note = DNA
  misc_feature 62: note = RNA
  misc_feature 63..64: note = DNA
  misc_feature 65..67: note = RNA
agcatagcaagttaaaataaggctagtccgttatcaacttgaaaaagtggcaccgagtcggtgcttt

SEQ ID NO: 1639 - RNA, 62 nt, synthetic construct
  misc_difference 1..20: note = a, c, u, g, unknown or other
  misc_feature 1..62: note = Description of Artificial Sequence: Synthetic oligonucleotide
  source 1..62: mol_type = other RNA
nnnnnnnnnnnnnnnnnnnngttttagagctagaaatagcaagttaaaataaggctagtccg

SEQ ID NO: 1640 - DNA, 73 bp, synthetic construct
  misc_feature 1..73: note = Description of Artificial Sequence: Synthetic oligonucleotide
  source 1..73: mol_type = other DNA
tgaatggtcccaaaacggaagggcctgagtccgagcagaagaagaagttttagagctatgctgttttgaatgg

SEQ ID NO: 1641 - DNA, 69 bp, Homo sapiens
  source 1..69: mol_type = unassigned DNA
ctggtcttccacctctctgccctgaacacccaatctcggcccctctcgccaccctcctgcatttctgtt

SEQ ID NO: 1642 - DNA, 138 bp, Mus musculus
  source 1..138: mol_type = unassigned DNA
acccaagcactgagtgccattagctaaatgcatagggtaccacccacaggtgccaggggcctttcccaaagttcccagccccttctccaacctttcctggcccagaggctttcccatgtgtgtggctggaccctttga

SEQ ID NO: 1643 - DNA, 21 bp, synthetic construct
  misc_feature 1..21: note = Description of Artificial Sequence: Synthetic primer
  source 1..21: mol_type = other DNA
aaaaccacccttctctctggc

SEQ ID NO: 1644 - DNA, 21 bp, synthetic construct
  misc_feature 1..21: note = Description of Artificial Sequence: Synthetic primer
  source 1..21: mol_type = other DNA
ggagattggagacacggagag

SEQ ID NO: 1645 - DNA, 20 bp, synthetic construct
  misc_feature 1..20: note = Description of Artificial Sequence: Synthetic primer
  source 1..20: mol_type = other DNA
ctggaaagccaatgcctgac

SEQ ID NO: 1646 - DNA, 20 bp, synthetic construct
  misc_feature 1..20: note = Description of Artificial Sequence: Synthetic primer
  source 1..20: mol_type = other DNA
ggcagcaaactccttgtcct

SEQ ID NO: 1647 - DNA, 20 bp, synthetic construct
  misc_feature 1..20: note = Description of Artificial Sequence: Synthetic primer
  source 1..20: mol_type = other DNA
gtgctttgcagaggcctacc

SEQ ID NO: 1648 - DNA, 20 bp, synthetic construct
  misc_feature 1..20: note = Description of Artificial Sequence: Synthetic primer
  source 1..20: mol_type = other DNA
cctggagcgcatgcagtagt

SEQ ID NO: 1649 - DNA, 22 bp, synthetic construct
  misc_feature 1..22: note = Description of Artificial Sequence: Synthetic primer
  source 1..22: mol_type = other DNA
accttctgtgtttccaccattc

SEQ ID NO: 1650 - DNA, 20 bp, synthetic construct
  misc_feature 1..20: note = Description of Artificial Sequence: Synthetic primer
  source 1..20: mol_type = other DNA
ttggggagtgcacagacttc

SEQ ID NO: 1651 - DNA, 30 bp, synthetic construct
  misc_feature 1..30: note = Description of Artificial Sequence: Synthetic probe
  source 1..30: mol_type = other DNA
tagctctaaaacttcttcttctgctcggac

SEQ ID NO: 1652 - DNA, 30 bp, synthetic construct
  misc_feature 1..30: note = Description of Artificial Sequence: Synthetic probe
  source 1..30: mol_type = other DNA
ctagccttattttaacttgctatgctgttt

SEQ ID NO: 1653 - RNA, 99 nt, synthetic construct
  misc_difference 1..20: note = a, c, u, g, unknown or other
  misc_feature 1..99: note = Description of Artificial Sequence: Synthetic oligonucleotide
  source 1..99: mol_type = other RNA
nnnnnnnnnnnnnnnnnnnngttttagagctagaaatagcaagttaaaataaggctagtccgttatcaacttgaaaaagtggcaccgagtcggtgcttt

SEQ ID NO: 1654 - DNA, 12 bp, Homo sapiens
  source 1..12: mol_type = unassigned DNA
tagcgggtaagc

SEQ ID NO: 1655 - DNA, 12 bp, Homo sapiens
  source 1..12: mol_type = unassigned DNA
tcggtgacatgt

SEQ ID NO: 1656 - DNA, 12 bp, Homo sapiens
  source 1..12: mol_type = unassigned DNA
actccccgtagg

SEQ ID NO: 1657 - DNA, 12 bp, Homo sapiens
  source 1..12: mol_type = unassigned DNA
actgcgtgttaa

SEQ ID NO: 1658 - DNA, 12 bp, Homo sapiens
  source 1..12: mol_type = unassigned DNA
acgtcgcctgat

SEQ ID NO: 1659 - DNA, 12 bp, Homo sapiens
  source 1..12: mol_type = unassigned DNA
taggtcgaccag

SEQ ID NO: 1660 - DNA, 12 bp, Homo sapiens
  source 1..12: mol_type = unassigned DNA
ggcgttaatgat

SEQ ID NO: 1661 - DNA, 12 bp, Homo sapiens
  source 1..12: mol_type = unassigned DNA
tgtcgcatgtta

SEQ ID NO: 1662 - DNA, 12 bp, Homo sapiens
  source 1..12: mol_type = unassigned DNA
atggaaacgcat

SEQ ID NO: 1663 - DNA, 12 bp, Homo sapiens
  source 1..12: mol_type = unassigned DNA
gccgaattcctc

SEQ ID NO: 1664 - DNA, 12 bp, Homo sapiens
  source 1..12: mol_type = unassigned DNA
gcatggtacgga

SEQ ID NO: 1665 - DNA, 12 bp, Homo sapiens
  source 1..12: mol_type = unassigned DNA
cggtactcttac

SEQ ID NO: 1666 - DNA, 12 bp, Homo sapiens
  source 1..12: mol_type = unassigned DNA
gcctgtgccgta

SEQ ID NO: 1667 - DNA, 12 bp, Homo sapiens
  source 1..12: mol_type = unassigned DNA
tacggtaagtcg

SEQ ID NO: 1668 - DNA, 12 bp, Homo sapiens
  source 1..12: mol_type = unassigned DNA
cacgaaattacc

SEQ ID NO: 1669 - DNA, 12 bp, Homo sapiens
  source 1..12: mol_type = unassigned DNA
aaccaagatacg

SEQ ID NO: 1670 - DNA, 12 bp, Homo sapiens
  source 1..12: mol_type = unassigned DNA
gagtcgatacgc

SEQ ID NO: 1671 - DNA, 12 bp, Homo sapiens
  source 1..12: mol_type = unassigned DNA
gtctcacgatcg

SEQ ID NO: 1672 - DNA, 12 bp, Homo sapiens
  source 1..12: mol_type = unassigned DNA
tcgtcgggtgca

SEQ ID NO: 1673 - DNA, 12 bp, Homo sapiens
  source 1..12: mol_type = unassigned DNA
actccgtagtga

SEQ ID NO: 1674 - DNA, 12 bp, Homo sapiens
  source 1..12: mol_type = unassigned DNA
caggacgtccgt

SEQ ID NO: 1675 - DNA, 12 bp, Homo sapiens
  source 1..12: mol_type = unassigned DNA
tcgtatccctac

SEQ ID NO: 1676 - DNA, 12 bp, Homo sapiens
  source 1..12: mol_type = unassigned DNA
tttcaaggccgg

SEQ ID NO: 1677 - DNA, 12 bp, Homo sapiens
  source 1..12: mol_type = unassigned DNA
cgccggtggaat

SEQ ID NO: 1678 - DNA, 12 bp, Homo sapiens
  source 1..12: mol_type = unassigned DNA
gaacccgtccta

SEQ ID NO: 1679 - DNA, 12 bp, Homo sapiens
  source 1..12: mol_type = unassigned DNA
gattcatcagcg

SEQ ID NO: 1680 - DNA, 12 bp, Homo sapiens
  source 1..12: mol_type = unassigned DNA
acaccggtcttc

SEQ ID NO: 1681 - DNA, 12 bp, Homo sapiens
  source 1..12: mol_type = unassigned DNA
atcgtgccctaa

SEQ ID NO: 1682 - DNA, 12 bp, Homo sapiens
  source 1..12: mol_type = unassigned DNA
gcgtcaatgttc

SEQ ID NO: 1683 - DNA, 12 bp, Homo sapiens
  source 1..12: mol_type = unassigned DNA
ctccgtatctcg

SEQ ID NO: 1684 - DNA, 12 bp, Homo sapiens
  source 1..12: mol_type = unassigned DNA
ccgattccttcg

SEQ ID NO: 1685 - DNA, 12 bp, Homo sapiens
  source 1..12: mol_type = unassigned DNA
tgcgcctccagt

SEQ ID NO: 1686 - DNA, 12 bp, Homo sapiens
  source 1..12: mol_type = unassigned DNA
taacgtcggagc

SEQ ID NO: 1687 - DNA, 12 bp, Homo sapiens
  source 1..12: mol_type = unassigned DNA
aaggtcgcccat

SEQ ID NO: 1688 - DNA, 12 bp, Homo sapiens
  source 1..12: mol_type = unassigned DNA
gtcggggactat

SEQ ID NO: 1689 - DNA, 12 bp, Homo sapiens
  source 1..12: mol_type = unassigned DNA
ttcgagcgattt

SEQ ID NO: 1690 - DNA, 12 bp, Homo sapiens
  source 1..12: mol_type = unassigned DNA
tgagtcgtcgag

SEQ ID NO: 1691 - DNA, 12 bp, Homo sapiens
  source 1..12: mol_type = unassigned DNA
tttacgcagagg

SEQ ID NO: 1692 - DNA, 12 bp, Homo sapiens
  source 1..12: mol_type = unassigned DNA
aggaagtatcgc

SEQ ID NO: 1693 - DNA, 12 bp, Homo sapiens
  source 1..12: mol_type = unassigned DNA
actcgataccat

SEQ ID NO: 1694 - DNA, 12 bp, Homo sapiens
  source 1..12: mol_type = unassigned DNA
cgctacatagca

SEQ ID NO: 1695 - DNA, 12 bp, Homo sapiens
  source 1..12: mol_type = unassigned DNA
ttcataaccggc

SEQ ID NO: 1696 - DNA, 12 bp, Homo sapiens
  source 1..12: mol_type = unassigned DNA
ccaaacggttaa

SEQ ID NO: 1697 - DNA, 12 bp, Homo sapiens
  source 1..12: mol_type = unassigned DNA
cgattccttcgt

SEQ ID NO: 1698 - DNA, 12 bp, Homo sapiens
  source 1..12: mol_type = unassigned DNA
cgtcatgaataa

SEQ ID NO: 1699 - DNA, 12 bp, Homo sapiens
  source 1..12: mol_type = unassigned DNA
agtggcgatgac

SEQ ID NO: 1700 - DNA, 12 bp, Homo sapiens
  source 1..12: mol_type = unassigned DNA
cccctacggcac

SEQ ID NO: 1701 - DNA, 12 bp, Homo sapiens
  source 1..12: mol_type = unassigned DNA
gccaacccgcac

SEQ ID NO: 1702 - DNA, 12 bp, Homo sapiens
  source 1..12: mol_type = unassigned DNA
tgggacaccggt

SEQ ID NO: 1703 - DNA, 12 bp, Homo sapiens
  source 1..12: mol_type = unassigned DNA
ttgactgcggcg

SEQ ID NO: 1704 - DNA, 12 bp, Homo sapiens
  source 1..12: mol_type = unassigned DNA
actatgcgtagg

SEQ ID NO: 1705 - DNA, 12 bp, Homo sapiens
  source 1..12: mol_type = unassigned DNA
tcacccaaagcg

SEQ ID NO: 1706 - DNA, 12 bp, Homo sapiens
  source 1..12: mol_type = unassigned DNA
gcaggacgtccg

SEQ ID NO: 1707 - DNA, 12 bp, Homo sapiens
  source 1..12: mol_type = unassigned DNA
acaccgaaaacg

SEQ ID NO: 1708 - DNA, 12 bp, Homo sapiens
  source 1..12: mol_type = unassigned DNA
cggtgtattgag

SEQ ID NO: 1709 - DNA, 12 bp, Homo sapiens
  source 1..12: mol_type = unassigned DNA
cacgaggtatgc

SEQ ID NO: 1710 - DNA, 12 bp, Homo sapiens
  source 1..12: mol_type = unassigned DNA
taaagcgacccg

SEQ ID NO: 1711 - DNA, 12 bp, Homo sapiens
  source 1..12: mol_type = unassigned DNA
cttagtcggcca

SEQ ID NO: 1712 - DNA, 12 bp, Homo sapiens
  source 1..12: mol_type = unassigned DNA
cgaaaacgtggc

SEQ ID NO: 1713 - DNA, 12 bp, Homo sapiens
  source 1..12: mol_type = unassigned DNA
cgtgccctgaac

SEQ ID NO: 1714 - DNA, 12 bp, Homo sapiens
  source 1..12: mol_type = unassigned DNA
tttaccatcgaa

SEQ ID NO: 1715 - DNA, 12 bp, Homo sapiens
  source 1..12: mol_type = unassigned DNA
cgtagccatgtt

SEQ ID NO: 1716 - DNA, 12 bp, Homo sapiens
  source 1..12: mol_type = unassigned DNA
cccaaacggtta

SEQ ID NO: 1717 - DNA, 12 bp, Homo sapiens
  source 1..12: mol_type = unassigned DNA
gcgttatcagaa

SEQ ID NO: 1718 - DNA, 12 bp, Homo sapiens
  source 1..12: mol_type = unassigned DNA
tcgatggtaaac

SEQ ID NO: 1719 - DNA, 12 bp, Homo sapiens
  source 1..12: mol_type = unassigned DNA
cgactttttgca

SEQ ID NO: 1720 - DNA, 12 bp, Homo sapiens
  source 1..12: mol_type = unassigned DNA
tcgacgactcac

SEQ ID NO: 1721 - DNA, 12 bp, Homo sapiens
  source 1..12: mol_type = unassigned DNA
acgcgtcagata

SEQ ID NO: 1722 - DNA, 12 bp, Homo sapiens
  source 1..12: mol_type = unassigned DNA
cgtacggcacag

SEQ ID NO: 1723 - DNA, 12 bp, Homo sapiens
  source 1..12: mol_type = unassigned DNA
ctatgccgtgca

SEQ ID NO: 1724 - DNA, 12 bp, Homo sapiens
  source 1..12: mol_type = unassigned DNA
cgcgtcagatat

SEQ ID NO: 1725 - DNA, 12 bp, Homo sapiens
  source 1..12: mol_type = unassigned DNA
aagatcggtagc

SEQ ID NO: 1726 - DNA, 12 bp, Homo sapiens
  source 1..12: mol_type = unassigned DNA
cttcgcaaggag

SEQ ID NO: 1727 - DNA, 12 bp, Homo sapiens
  source 1..12: mol_type = unassigned DNA
gtcgtggactac

SEQ ID NO: 1728 - DNA, 12 bp, Homo sapiens
  source 1..12: mol_type = unassigned DNA
ggtcgtcatcaa

SEQ ID NO: 1729 - DNA, 12 bp, Homo sapiens
  source 1..12: mol_type = unassigned DNA
gttaacagcgtg

SEQ ID NO: 1730 - DNA, 12 bp, Homo sapiens
  source 1..12: mol_type = unassigned DNA
tagctaaccgtt

SEQ ID NO: 1731 - DNA, 12 bp, Homo sapiens
  source 1..12: mol_type = unassigned DNA
agtaaaggcgct

SEQ ID NO: 1732 - DNA, 12 bp, Homo sapiens
  source 1..12: mol_type = unassigned DNA
ggtaatttcgtg

SEQ ID NO: 1733 - DNA, 15 bp, synthetic construct
  misc_feature 1..15: note = Description of Artificial Sequence: Synthetic oligonucleotide
  source 1..15: mol_type = other DNA
cagaagaagaagggc

SEQ ID NO: 1734 - DNA, 51 bp, synthetic construct
  misc_feature 1..51: note = Description of Artificial Sequence: Synthetic oligonucleotide
  source 1..51: mol_type = other DNA
ccaatggggaggacatcgatgtcacctccaatgactagggtggtgggcaac

SEQ ID NO: 1735 - DNA, 15 bp, synthetic construct
  misc_feature 1..15: note = Description of Artificial Sequence: Synthetic oligonucleotide
  source 1..15: mol_type = other DNA
ctctggccactccct

SEQ ID NO: 1736 - DNA, 52 bp, synthetic construct
  misc_feature 1..52: note = Description of Artificial Sequence: Synthetic oligonucleotide
  source 1..52: mol_type = other DNA
acatcgatgtcacctccaatgacaagcttgctagcggtgggcaaccacaaac

SEQ ID NO: 1737-1738 - skipped (2 entries)

SEQ ID NO: 1739 - DNA, 54 bp, synthetic construct
  misc_feature 1..54: note = Description of Artificial Sequence: Synthetic oligonucleotide
  source 1..54: mol_type = other DNA
aacaccgggtcttcgagaagacctgttttagagctagaaatagcaagttaaaat

SEQ ID NO: 1740 - DNA, 54 bp, synthetic construct
  misc_feature 1..54: note = Description of Artificial Sequence: Synthetic oligonucleotide
  source 1..54: mol_type = other DNA
caaaacgggtcttcgagaagacgttttagagctatgctgttttgaatggtccca

SEQ ID NO: 1741 - DNA, 4104 bp, Homo sapiens
  source 1..4104: mol_type = unassigned DNA
  CDS 1..4104
atggacaagaagtacagcatcggcctggacatcggcaccaactctgtgggctgggccgtgatcaccgacgagtacaaggtgcccagcaagaaattcaaggtgctgggcaacaccgaccggcacagcatcaagaagaacctgatcggagccctgctgttcgacagcggcgaaacagccgaggccacccggctgaagagaaccgccagaagaagatacaccagacggaagaaccggatctgctatctgcaagagatcttcagcaacgagatggccaaggtggacgacagcttcttccacagactggaagagtccttcctggtggaagaggataagaagcacgagcggcaccccatcttcggcaacatcgtggacgaggtggcctaccacgagaagtaccccaccatctaccacctgagaaagaaactggtggacagcaccgacaaggccgacctgcggctgatctatctggccctggcccacatgatcaagttccggggccacttcctgatcgagggcgacctgaaccccgacaacagcgacgtggacaagctgttcatccagctggtgcagacctacaaccagctgttcgaggaaaaccccatcaacgccagcggcgtggacgccaaggccatcctgtctgccagactgagcaagagcagacggctggaaaatctgatcgcccagctgcccggcgagaagaagaatggcctgttcggcaacctgattgccctgagcctgggcctgacccccaacttcaagagcaacttcgacctggccgaggatgccaaactgcagctgagcaaggacacctacgacgacgacctggacaacctgctggcccagatcggcgaccagtacgccgacctgtttctggccgccaagaacctgtccgacgccatcctgctgagcgacatcctgagagtgaacaccgagatcaccaaggcccccctgagcgcctctatgatcaagagatacgacgagcaccaccaggacctgaccctgctgaaagctctcgtgcggcagcagctgcctgagaagtacaaagagattttcttcgaccagagcaagaacggctacgccggctacattgacggcggagccagccaggaagagttctacaagttcatcaagcccatcctggaaaagatggacggcaccgaggaactgctcgtgaagctgaacagagaggacctgctgcggaagcagcggaccttcgacaacggcagcatcccccaccagatccacctgggagagctgcacgccattctgcggcggcaggaagatttttacccattcctgaaggacaaccgggaaaagatcgagaagatcctgaccttccgcatcccctactacgtgggccctctggccaggggaaacagcagattcgcctggatgaccagaaagagcgaggaaaccatcaccccctggaacttcgaggaagtggtggacaagggcgcttccgcccagagcttcatcgagcggatgaccaacttcgataagaacctgcccaacgagaaggtgctgcccaagcacagcctgctgtacgagtacttcaccgtgtataacgagctgaccaaagtgaaatacgtgaccgagggaatgagaaagcccgccttcctgagcggcgagcagaaaaaggccatcgtggacctgctgttcaagaccaaccggaaagtgaccgtgaagcagctgaaagaggactacttcaagaaaatcgagtgcttcgactccgtggaaatctccggcgtggaagatcggttcaacgcctccctgggcacataccacgatctgctgaaaattatcaaggacaaggacttcctggacaatgaggaaaacgaggacattctggaagatatcgtgctgaccctgacactgtttgaggacagagagatgatcgaggaacggctgaaaacctatgcccacctgttcgacgacaaagtgatgaagcagctgaagcggcggagatacaccggctggggcaggctgagccggaagctgatcaacggcatccgggacaagcagtccggcaagacaatcctggatttcctgaagtccgacggcttcgccaacagaaacttcatgcagctgatccacgacgacagcctgacctttaaagaggacatccagaaagcccaggtgtccggccagggcgatagcctgcacgagcacattgccaatctggccggcagccccgccattaagaagggcatcctgcagacagtgaaggtggtggacgagctcgtgaaagtgatgggccggcacaagcccgagaacatcgtgatcgccatggccagagagaaccagaccacccagaagggacagaagaacagccgcgagagaatgaagcggatcgaagagggcatcaaagagctgggcagccagatcctgaaagaacaccccgtggaaaacacccagctgcagaacgagaagctgtacctgtactacctgcagaatgggcgggatatgtacgtggaccaggaactggacatcaaccggctgtccgactacgatgtggacgccatcgtgcctcagagctttctgaaggacgactccatcgacgccaaggtgctgaccagaagcgacaaggcccggggcaagagcgacaacgtgccctccgaagaggtcgtgaagaagatgaagaactactggcggcagctgctgaacgccaagctgattacccagagaaagttcgacaatctgaccaaggccgagagaggcggcctgagcgaactggataaggccggcttcatcaagagacagctggtggaaacccggcagatcacaaagcacgtggcacagatcctggactcccggatgaacactaagtacgacgagaatgacaagctgatccgggaagtgaaagtgatcaccctgaagtccaagctggtgtccgatttccggaaggatttccagttttacaaagtgcgcgagatcaacaactaccaccacgcccacgccgcctacctgaacgccgtcgtgggaaccgccctgatcaaaaagtaccctaagctggaaagcgagttcgtgtacggcgactacaaggtgtacgacgtgcggaagatgatcgccaagagcgagcaggaaatcggcaaggctaccgccaagtacttcttctacagcaacatcatgaactttttcaagaccgagattaccctggccaacggcgagatccggaagcggcctctgatcgagacaaacggcgaaaccggggagatcgtgtgggataagggccgggattttgccaccgtgcggaaagtgctgagcatgccccaagtgaatatcgtgaaaaagaccgaggtgcagacaggcggcttcagcaaagagtctatcctgcccaagaggaacagcgataagctgatcgccagaaagaaggactgggaccctaagaagtacggcggcttcgacagccccaccgtggcctattctgtgctggtggtggccaaagtggaaaagggcaagtccaagaaactgaagagtgtgaaagagctgctggggatcaccatcatggaaagaagcagcttcgagaagaatcccatcgactttctggaagccaagggctacaaagaagtgaaaaaggacctgatcatcaagctgcctaagtactccctgttcgagctggaaaacggccggaagagaatgctggcctctgccggcgaactgcagaagggaaacgaactggccctgccctccaaatatgtgaacttcctgtacctggccagccactatgagaagctgaagggctcccccgaggataatgagcagaaacagctgtttgtggaacagcacaagcactacctggacgagatcatcgagcagatcagcgagttctccaagagagtgatcctggccgacgctaatctggacaaagtgctgtccgcctacaacaagcaccgggataagcccatcagagagcaggccgagaatatcatccacctgtttaccctgaccaatctgggagcccctgccgccttcaagtactttgacaccaccatcgaccggaagaggtacaccagcaccaaagaggtgctggacgccaccctgatccaccagagcatcaccggcctgtacgagacacggatcgacctgtctcagctgggaggcgac

SEQ ID NO: 1742 - protein, 1368 aa, Homo sapiens
MDKKYSIGLDIGTNSVGWAVITDEYKVPSKKFKVLGNTDRHSIKKNLIGALLFDSGETAEATRLKRTARRRYTRRKNRICYLQEIFSNEMAKVDDSFFHRLEESFLVEEDKKHERHPIFGNIVDEVAYHEKYPTIYHLRKKLVDSTDKADLRLIYLALAHMIKFRGHFLIEGDLNPDNSDVDKLFIQLVQTYNQLFEENPINASGVDAKAILSARLSKSRRLENLIAQLPGEKKNGLFGNLIALSLGLTPNFKSNFDLAEDAKLQLSKDTYDDDLDNLLAQIGDQYADLFLAAKNLSDAILLSDILRVNTEITKAPLSASMIKRYDEHHQDLTLLKALVRQQLPEKYKEIFFDQSKNGYAGYIDGGASQEEFYKFIKPILEKMDGTEELLVKLNREDLLRKQRTFDNGSIPHQIHLGELHAILRRQEDFYPFLKDNREKIEKILTFRIPYYVGPLARGNSRFAWMTRKSEETITPWNFEEVVDKGASAQSFIERMTNFDKNLPNEKVLPKHSLLYEYFTVYNELTKVKYVTEGMRKPAFLSGEQKKAIVDLLFKTNRKVTVKQLKEDYFKKIECFDSVEISGVEDRFNASLGTYHDLLKIIKDKDFLDNEENEDILEDIVLTLTLFEDREMIEERLKTYAHLFDDKVMKQLKRRRYTGWGRLSRKLINGIRDKQSGKTILDFLKSDGFANRNFMQLIHDDSLTFKEDIQKAQVSGQGDSLHEHIANLAGSPAIKKGILQTVKVVDELVKVMGRHKPENIVIAMARENQTTQKGQKNSRERMKRIEEGIKELGSQILKEHPVENTQLQNEKLYLYYLQNGRDMYVDQELDINRLSDYDVDAIVPQSFLKDDSIDAKVLTRSDKARGKSDNVPSEEVVKKMKNYWRQLLNAKLITQRKFDNLTKAERGGLSELDKAGFIKRQLVETRQITKHVAQILDSRMNTKYDENDKLIREVKVITLKSKLVSDFRKDFQFYKVREINNYHHAHAAYLNAVVGTALIKKYPKLESEFVYGDYKVYDVRKMIAKSEQEIGKATAKYFFYSNIMNFFKTEITLANGEIRKRPLIETNGETGEIVWDKGRDFATVRKVLSMPQVNIVKKTEVQTGGFSKESILPKRNSDKLIARKKDWDPKKYGGFDSPTVAYSVLVVAKVEKGKSKKLKSVKELLGITIMERSSFEKNPIDFLEAKGYKEVKKDLIIKLPKYSLFELENGRKRMLASAGELQKGNELALPSKYVNFLYLASHYEKLKGSPEDNEQKQLFVEQHKHYLDEIIEQISEFSKRVILADANLDKVLSAYNKHRDKPIREQAENIIHLFTLTNLGAPAAFKYFDTTIDRKRYTSTKEVLDATLIHQSITGLYETRIDLSQLGGD

SEQ ID NO: 1743 - DNA, 57 bp, Homo sapiens
  source 1..57: mol_type = unassigned DNA
  CDS 1..57
ggcaccattaaagaaaatatcattggtgtttcctatgatgaatatagatacagaagc

SEQ ID NO: 1744 - protein, 19 aa, Homo sapiens
GTIKENIIGVSYDEYRYRS

SEQ ID NO: 1745 - DNA, 48 bp, synthetic construct
  misc_feature 1..48: note = Description of Artificial Sequence: Synthetic oligonucleotide
  source 1..48: mol_type = other DNA
  CDS 1..48
attaaagaaaatatcattggctttgtttcctatgatgaatatagatac

SEQ ID NO: 1746 - protein, 16 aa, synthetic construct
  REGION 1..16: note = Description of Artificial Sequence: Synthetic peptide
IKENIIGFVSYDEYRY

SEQ ID NO: 1747 - protein, 15 aa, synthetic construct
  REGION 1..15: note = Description of Artificial Sequence: Synthetic peptide
GGGGSGGGGSGGGGS

SEQ ID NO: 1748 - protein, 15 aa, synthetic construct
  REGION 1..15: note = Description of Artificial Sequence: Synthetic peptide
EAAAKEAAAKEAAAK

SEQ ID NO: 1749 - protein, 18 aa, synthetic construct
  REGION 1..18: note = Description of Artificial Sequence: Synthetic peptide
GGGGGSGGGGGSGGGGGS

SEQ ID NO: 1750 - DNA, 19 bp, synthetic construct
  misc_feature 1..19: note = Description of Artificial Sequence: Synthetic oligonucleotide
  source 1..19: mol_type = other DNA
gggcgcacctctctttacg
